(19) United States
(12) Patent Application Publication
(10) Pub. No.: US 2024/0043856 A1
(43) Pub. Date: Feb. 8, 2024

(54) PLANT REGULATORY ELEMENTS AND USES THEREOF

(71) Applicant: Monsanto Technology LLC, St. Louis, MO (US)

(72) Inventors: Stanislaw Flasinski, Ballwin, MO (US); Charles R. Dietrich, Chesterfield, MO (US); Wei Wu, Chesterfield, MO (US); Zhaolong Li, St. Charles, MO (US); Bo-Xing Qiu, Chesterfield, MO (US); Liang Guo, Cary, NC (US); Jaishree M. Chittoor, Wildwood, MO (US)

(21) Appl. No.: 18/460,371

(22) Filed: Sep. 1, 2023

Related U.S. Application Data
(63) Continuation of application No. 17/165,055, filed on Feb. 2, 2021.
Application No. 17/165,055 is a division of application No. 16/374,211, filed on Apr. 3, 2019, now Pat. No. 10,995,340.
Application No. 16/374,211 is a continuation of application No. 15/476,701, filed on Mar. 31, 2017, now Pat. No. 10,301,625.
Application No. 15/476,701 is a continuation of application No. 13/520,780, filed on Oct. 18, 2012, now Pat. No. 9,637,736.
(60) Provisional application No. 61/295,162, filed on Jan. 14, 2010.
(60) Provisional application No. 61/295,160, filed on Jan. 14, 2010.
(60) Provisional application No. 61/339,057, filed on Feb. 26, 2010.
(60) Provisional application No. 61/308,921, filed on Feb. 27, 2010.
(60) Provisional application No. 61/308,919, filed on Feb. 27, 2010.
(60) Provisional application No. 61/331,924, filed on May 6, 2010.

(51) Int. Cl. C12N 15/82; C12N 15/113

(52) U.S. Cl. CPC C12N 15/8221; C12N 15/113; C12N 15/8222

(57) ABSTRACT

The invention provides DNA molecules and constructs, and their nucleotide sequences, useful for modulating gene expression in plants, and for specifying intracellular or extracellular localization of a gene product of interest. Transgenic plants, plant cells, plant parts, and seeds, comprising the DNA molecules operably linked to heterologous transcribable polynucleotides are also provided.

### REFERENCE TO RELATED APPLICATIONS

[0001] This application claims the benefit of United States provisional application Nos. 61/295,160 filed Jan. 14, 2010; 61/295,162 filed Jan. 14, 2010; 61/339,057 filed Feb. 26, 2010; 61/308,919 filed Feb. 27, 2010; 61/308,921 filed Feb. 27, 2010; and 61/331,924 filed May 6, 2010, all herein incorporated by reference in their entirety.

### INCORPORATION OF SEQUENCE LISTING

[0002] The sequence listing that is contained in the file named “MONS279WO_ST25.txt”, which is 1,194 KB (as measured in Microsoft Windows®) and was created on Jan. 11, 2011, is filed herewith by electronic submission and is incorporated by reference herein.

### FIELD OF THE INVENTION

[0003] The invention relates to the field of plant molecular biology and plant genetic engineering and DNA molecules useful for modulating gene expression in plants, and for specifying intracellular or extracellular localization of a gene product.

### BACKGROUND

[0004] Regulatory elements are genetic elements that regulate gene activity by modulating the transcription of an operably linked transcribable polynucleotide molecule. Such elements include promoters, leaders, introns, and 3′ untranslated regions and are useful in the field of plant molecular biology and plant genetic engineering.

### SUMMARY OF THE INVENTION

[0005] The present invention provides novel gene regulatory elements and transit peptide encoding sequences for use in plants. The present invention also provides DNA constructs comprising the regulatory elements and transit peptide encoding sequences. The present invention also provides transgenic plant cells, plants, and seeds comprising the regulatory elements and/or the transit peptide encoding sequences, operably linked to a transcribable polynucleotide molecule. The present invention also provides methods of making and using the regulatory elements, the DNA constructs comprising the regulatory elements, and the transgenic plant cells, plants, and seeds comprising the regulatory elements operably linked to a transcribable polynucleotide molecule.

[0006] Thus, in one aspect, the present invention provides a DNA molecule comprising a DNA sequence selected from the group consisting of a) a sequence with at least 85 percent sequence identity to any of SEQ ID NOs: 1-323 or SEQ ID NOs: 352-924; b) a sequence of any of SEQ ID NOs: 1-323 or SEQ ID NOs: 352-924; and c) a fragment of any of SEQ ID NOs: 1-323 or SEQ ID NOs: 352-924; wherein the fragment has gene regulatory activity or wherein the encoded peptide functions to localize an operably linked polypeptide within a cell; and wherein said sequence is operably linked to a heterologous transcribable polynucleotide molecule. In one embodiment, the sequence has at least 90 percent sequence identity to a DNA sequence selected from the group consisting of: SEQ ID NOs: 1-323 and SEQ ID NOS: 352-924. In another embodiment, the sequence has at least 95 percent sequence identity to a DNA sequence selected from the group consisting of: SEQ ID NOs: 1-323 and SEQ ID NOs: 352-924. In certain embodiments of the DNA molecule, the DNA sequence comprises a regulatory element. In some embodiments the regulatory element comprises a promoter. In particular embodiments, the heterologous transcribable polynucleotide molecule comprises a gene of agronomic interest, a gene capable of providing herbicide resistance in plants, or a gene capable of providing plant pest control in plants.

[0007] The invention also provides a plant cell comprising a DNA construct comprising a sequence of any of SEQ ID NOs: 1-323 or SEQ ID NOs: 352-924, or a fragment or variant thereof, wherein said sequence is operably linked to a heterologous transcribable polynucleotide molecule. In certain embodiments, the transgenic plant cell is a monocotyledonous plant cell. In other embodiments, the transgenic plant cell is a dicotyledonous plant cell.

[0008] Also included is a transgenic plant, or part thereof, comprising a DNA molecule comprising a DNA sequence selected from the group consisting of: a) a sequence with at least 85 percent sequence identity to any of SEQ ID NOs: 1-323 or SEQ ID NOs: 352-924; b) a sequence of any of SEQ ID NOs: 1-323 or SEQ ID NOs: 352-924; and c) a fragment of any of SEQ ID NOs: 1-323 or SEQ ID NOs: 352-924; wherein the fragment has gene regulatory activity or wherein the encoded peptide functions to localize an operably linked polypeptide within a cell; and wherein said sequence is operably linked to a heterologous transcribable polynucleotide molecule. In some embodiments a progeny plant of any generation of such a transgenic plant, or a part thereof, is provided. Further, a transgenic seed, wherein the seed comprises such a DNA molecule is also provided.

[0009] In another aspect, the invention provides a DNA molecule comprising a DNA sequence encoding a chloroplast transit peptide, wherein the protein sequence of the encoded transit peptide is selected from the group consisting of: a) a transit peptide protein sequence of any of SEQ ID NOs: 324-350; and b) a transit peptide protein sequence with at least 95 percent sequence identity to any of SEQ ID NOs: 324-350; wherein the chloroplast transit peptide-encoding DNA molecule is operably linked to a heterologous transcribable polynucleotide molecule. In some embodiments, such a DNA molecule comprises a DNA sequence encoding a chloroplast transit peptide, wherein the DNA sequence is selected from the group consisting of SEQ ID NOs: 277-284, 289-293, 296, 301-304 and 307-316. The present invention thus provides a DNA construct encoding such a chloroplast transit peptide.

[0010] Also provided by the invention is a transgenic plant cell comprising a DNA sequence encoding a chloroplast transit peptide, wherein the sequence of the chloroplast transit peptide is selected from the group consisting of SEQ ID NOs: 324-350. In some embodiments, the transgenic plant cell is a monocotyledonous plant cell. In other embodiments, the transgenic plant cell is a dicotyledonous plant cell. A transgenic plant, or part thereof, comprising the DNA molecule is also contemplated by the invention, as well as a progeny transgenic plant of any generation, or part thereof, of the transgenic plant; and a transgenic seed, each comprising the DNA molecule.

### BRIEF DESCRIPTION OF THE FIGURES

[0011] FIGS. 1a-1c depict alignment of size variants corresponding to SEQ ID NOs:24-25 for the Foxtail Millet Actin 8 promoter.

[0012] FIGS. 2a-2c depict alignment of size variants corresponding to SEQ ID NOs:28-29 for the Foxtail Millet Alc1 promoter.

[0013] FIGS. 3a-3f depict alignment of size variants corresponding to SEQ ID NOs:45-46 for the Foxtail Millet Cys promoter.

[0014] FIGS. 4a-4f depict alignment of size variants corresponding to SEQ ID NOs:47-48 for the Foxtail Millet Dzs promoter.

[0015] FIGS. 5a-5c depict alignment of size variants corresponding to SEQ ID NOs:58-59 for the Foxtail Millet Gst promoter.

[0016] FIGS. 6a-6C depict alignment of size variants corresponding to SEQ ID NOs:60-61 for the Foxtail Millet Ifr promoter.

[0017] FIGS. 7a-7d depict alignment of size variants corresponding to SEQ ID NOs:64-65 for the Foxtail Millet Nrt2 promoter.

[0018] FIGS. 8a-8e depict alignment of size variants corresponding to SEQ ID NOs:74-75 for the Foxtail Millet Ppc promoter.

[0019] FIGS. 9a-9f depict alignment of size variants corresponding to SEQ ID NOs:82-83 for the Foxtail Millet Prx3 promoter.

[0020] FIGS. 10a-10f depict alignment of size variants corresponding to SEQ ID NOs:88-91 for the Foxtail millet Rcc3 promoter.

[0021] FIGS. 11a-11b depict alignment of size variants corresponding to SEQ ID NOs:93-94 for the Foxtail Millet Ssp1 promoter.

[0022] FIGS. 12a-12d depict alignment of size variants corresponding to SEQ ID NOs:96-97 for the Foxtail Millet Tip promoter.

[0023] FIGS. 13a-13d depict alignment of size variants corresponding to SEQ ID NOs:98-99 for the Foxtail Millet TubA2-1 promoter.

[0024] FIGS. 14a-14c depict alignment of size variants corresponding to SEQ ID NOs:102-103 for the Foxtail Millet Ubq1 promoter.

[0025] FIG. 15 depicts transgene cassette configurations of the present invention.

### DETAILED DESCRIPTION OF THE INVENTION

[0026] The invention disclosed herein provides polynucleotide molecules having beneficial gene regulatory or other activity from foxtail millet, Setaria italica. The design, construction, and use of these polynucleotide molecules are one object of this invention. The nucleotide sequences of these polynucleotide molecules are provided among SEQ ID NO: 1 through SEQ ID NO:323 and SEQ ID NO:352 through SEQ ID NO:1060. These polynucleotide molecules are, for instance, capable of affecting the expression of an operably linked transcribable polynucleotide molecule in plant tissues, or of effecting localization of an encoded gene product, and therefore can selectively regulate gene expression, or activity of an encoded gene product, in transgenic plants. The present invention also provides methods of modifying, producing, and using the same. The invention also includes compositions, transformed host cells, transgenic plants, and seeds containing the promoters and/or other disclosed S. italica nucleotide sequences, and methods for preparing and using the same.

[0027] The following definitions and methods are provided to better define the present invention and to guide those of ordinary skill in the art in the practice of the present invention. Unless otherwise noted, terms are to be understood according to conventional usage by those of ordinary skill in the relevant art.

### DNA Molecules

[0028] As used herein, the term “DNA” or “DNA molecule” refers to a double-stranded DNA molecule of genomic or synthetic origin, i.e. a polymer of deoxyribonucleotide bases or a polynucleotide molecule, read from the 5′ (upstream) end to the 3′ (downstream) end. As used herein, the term “DNA sequence” refers to the nucleotide sequence of a DNA molecule. The nomenclature used herein is that required by Title 37 of the United States Code of Federal Regulations § 1.822 and set forth in the tables in WIPO Standard ST.25 (1998), Appendix 2, Tables 1 and 3.

[0029] As used herein, the term “isolated DNA molecule” refers to a DNA molecule at least partially separated from other molecules normally associated with it in its native or natural state. In one embodiment, the term “isolated” refers to a DNA molecule that is at least partially separated from the nucleic acids which normally flank the DNA molecule in its native or natural state. Thus, DNA molecules fused to regulatory or coding sequences with which they are not normally associated, for example as the result of recombinant techniques, are considered isolated herein. Such molecules are considered isolated even when integrated into the chromosome of a host cell or present in a nucleic acid solution with other DNA molecules.

[0030] Any number of methods well known to those skilled in the art can be used to isolate and manipulate a DNA molecule, or fragment thereof, disclosed in the present invention. For example, PCR (polymerase chain reaction) technology can be used to amplify a particular starting DNA molecule and/or to produce variants of the original molecule. DNA molecules, or fragment thereof, can also be obtained by other techniques such as by directly synthesizing the fragment by chemical means, as is commonly practiced by using an automated oligonucleotide synthesizer.

[0031] As used herein, the term “sequence identity” refers to the extent to which two optimally aligned polynucleotide sequences or two optimally aligned polypeptide sequences are identical. An optimal sequence alignment is created by manually aligning two sequences, e.g. a reference sequence and another sequence, to maximize the number of nucleotide matches in the sequence alignment with appropriate internal nucleotide insertions, deletions, or gaps. As used herein, the term “reference sequence” refers to a sequence provided as the polynucleotide sequences of SEQ ID NOS: 1 through 323 and 352 through 924 or the polypeptide sequences of SEQ ID NOS: 324 through 350.

[0032] As used herein, the term “percent sequence identity” or “percent identity” or “% identity” is the identity fraction times 100. The “identity fraction” for a sequence optimally aligned with a reference sequence is the number of nucleotide matches in the optimal alignment, divided by the total number of nucleotides in the reference sequence, e.g. the total number of nucleotides in the full length of the entire reference sequence. Thus, one embodiment of the invention is a DNA molecule comprising a sequence that when optimally aligned to a reference sequence, provided herein as SEQ ID NOS: 1 through 323 and 352 through 924, has about 85 percent identity or higher, about 90 percent identity or higher, about 95 percent identity or higher, or at least 96 percent identity, 97 percent identity, 98 percent identity, or 99 percent identity to the reference sequence and has gene regulatory activity.

### Regulatory Elements

[0033] A regulatory element is a DNA molecule having gene regulatory activity, i.e. one that has the ability to affect the transcription and/or translation of an operably linked transcribable polynucleotide molecule. The term “gene regulatory activity” thus refers to the ability to affect the expression pattern of an operably linked transcribable polynucleotide molecule by affecting the transcription and/or translation of that operably linked transcribable polynucleotide molecule. Gene regulatory activity may be positive and/or negative and the effect may be characterized by its temporal, spatial, developmental, tissue, environmental, physiological, pathological, cell cycle, and/or chemically responsive qualities as well as by quantitative or qualitative indications.

[0034] Regulatory elements such as promoters, leaders, introns, and transcription termination regions are DNA molecules that have gene regulatory activity and play an integral part in the overall expression of genes in living cells. The term “regulatory element” refers to a DNA molecule having gene regulatory activity, i.e. one that has the ability to affect the transcription and/or translation of an operably linked transcribable polynucleotide molecule. Isolated regulatory elements, such as promoters and leaders, that function in plants are therefore useful for modifying plant phenotypes through the methods of genetic engineering.

[0035] Regulatory elements may be characterized by their expression pattern, i.e. as constitutive and/or by their temporal, spatial, developmental, tissue, environmental, physiological, pathological, cell cycle, and/or chemically responsive expression pattern, and any combination thereof, as well as by quantitative or qualitative indications. A promoter is useful as a regulatory element for modulating the expression of an operably linked transcribable polynucleotide molecule.

[0036] As used herein, a “gene expression pattern” is any pattern of transcription of an operably linked DNA molecule into a transcribed RNA molecule. Expression may be characterized by its temporal, spatial, developmental, tissue, environmental, physiological, pathological, cell cycle, and/or chemically responsive qualities as well as by quantitative or qualitative indications. The transcribed RNA molecule may be translated to produce a protein molecule or may provide an antisense or other regulatory RNA molecule, such as a dsRNA, a tRNA, an rRNA, a miRNA, and the like.

[0037] As used herein, the term “protein expression is any pattern of translation of a transcribed RNA molecule into a protein molecule. Protein expression may be characterized by its temporal, spatial, developmental, or morphological qualities as well as by quantitative or qualitative indications.

[0038] As used herein, the term “promoter” refers generally to a DNA molecule that is involved in recognition and binding of RNA polymerase II and other proteins (trans-acting transcription factors) to initiate transcription. A promoter may be initially isolated from the 5′ untranslated region (5′ UTR) of a genomic copy of a gene. Alternately, promoters may be synthetically produced or manipulated DNA molecules. Promoters may also be chimeric, that is a promoter produced through the fusion of two or more heterologous DNA molecules. Promoters useful in practicing the present invention include SEQ ID NOS: 23 through 105 and SEQ ID NOS: 353 through 536 or fragments or variants thereof.

[0039] In one embodiment, fragments are provided of a promoter sequence disclosed herein. Promoter fragments may exhibit promoter activity, and may be useful alone or in combination with other promoters and promoter fragments, such as in constructing chimeric promoters. In specific embodiments, fragments of a promoter are provided comprising at least about 50, 95, 150, 250, 500, or about 750 contiguous nucleotides of a polynucleotide molecule having promoter activity disclosed herein.

[0040] A promoter or promoter fragment may also be analyzed for the presence of known promoter elements, i.e. DNA sequence characteristics, such as a TATA-box and other known transcription factor binding site motifs. Identification of such known promoter elements may be used by one of skill in the art to design variants of the promoter having a similar expression pattern to the original promoter.

[0041] As used herein, the term “enhancer” or “enhancer element” refers to a cis-acting transcriptional regulatory element, a.k.a. cis-element, which confers an aspect of the overall expression pattern, but is usually insufficient alone to drive transcription, of an operably linked polynucleotide sequence. Unlike promoters, enhancer elements do not usually include a transcription start site (TSS) or TATA box. A promoter may naturally comprise one or more enhancer elements that affect the transcription of an operably linked polynucleotide sequence. An isolated enhancer element may also be fused to a promoter to produce a chimeric promoter.cis-element, which confers an aspect of the overall modulation of gene expression. A promoter or promoter fragment may comprise one or more enhancer elements that effect the transcription of operably linked genes. Many promoter enhancer elements are believed to bind DNA-binding proteins and/or affect DNA topology, producing local conformations that selectively allow or restrict access of RNA polymerase to the DNA template or that facilitate selective opening of the double helix at the site of transcriptional initiation. An enhancer element may function to bind transcription factors that regulate transcription. Some enhancer elements bind more than one transcription factor, and transcription factors may interact with different affinities with more than one enhancer domain. Enhancer elements can be identified by a number of techniques, including deletion analysis, i.e. deleting one or more nucleotides from the 5′ end or internal to a promoter; DNA binding protein analysis using DNase I footprinting, methylation interference, electrophoresis mobility-shift assays, in vivo genomic footprinting by ligation-mediated PCR, and other conventional assays; or by DNA sequence similarity analysis using known cis-element motifs or enhancer elements as a target sequence or target motif with conventional DNA sequence comparison methods, such as BLAST. The fine structure of an enhancer domain can be further studied by mutagenesis (or substitution) of one or more nucleotides or by other conventional methods. Enhancer elements can be obtained by chemical synthesis or by isolation from regulatory elements that include such elements, and they can be synthesized with additional flanking nucleotides that contain useful restriction enzyme sites to facilitate subsequence manipulation. Thus, the design, construction, and use of enhancer elements according to the methods disclosed herein for modulating the expression of operably linked transcribable polynucleotide molecules are encompassed by the present invention.

[0042] As used herein, the term “leader” refers to a DNA molecule isolated from the untranslated 5′ region (5′ UTR) of a genomic copy of a gene and defined generally as a nucleotide segment between the transcription start site (TSS) and the protein coding sequence start site. Alternately, leaders may be synthetically produced or manipulated DNA elements. A leader can be used as a 5′ regulatory element for modulating expression of an operably linked transcribable polynucleotide molecule. Leader molecules may be used with a heterologous promoter or with their native promoter. Promoter molecules of the present invention may thus be operably linked to their native leader or may be operably linked to a heterologous leader. Leaders useful in practicing the present invention include SEQ ID NOS: 106 through 171 and SEQ ID NOS: 537 through 588 or fragments or variants thereof.

[0043] As used herein, the term “chimeric” refers to a single DNA molecule produced by fusing a first DNA molecule to a second DNA molecule, where neither first nor second DNA molecule would normally be found in that configuration, i.e. fused to the other. The chimeric DNA molecule is thus a new DNA molecule not otherwise normally found in nature. As used herein, the term “chimeric promoter” refers to a promoter produced through such manipulation of DNA molecules. A chimeric promoter may combine two or more DNA fragments; an example would be the fusion of a promoter to an enhancer element. Thus, the design, construction, and use of chimeric promoters according to the methods disclosed herein for modulating the expression of operably linked transcribable polynucleotide molecules are encompassed by the present invention.

[0044] As used herein, the term “variant” refers to a second DNA molecule that is in composition similar, but not identical to, a first DNA molecule and yet the second DNA molecule still maintains the general functionality, i.e. same or similar expression pattern, of the first DNA molecule. A variant may be a shorter or truncated version of the first DNA molecule and/or an altered version of the sequence of the first DNA molecule, such as one with different restriction enzyme sites and/or internal deletions, substitutions, and/or insertions. A “variant” can also encompass a regulatory element having a nucleotide sequence comprising a substitution, deletion and/or insertion of one or more nucleotides of a reference sequence, wherein the derivative regulatory element has more or less or equivalent transcriptional or translational activity than the corresponding parent regulatory molecule. The regulatory element “variants” will also encompass variants arising from mutations that naturally occur in bacterial and plant cell transformation. In the present invention, a polynucleotide sequence provided as SEQ ID NOS: 1 through 325 and 352 through 924 may be used to create variants that are in composition similar, but not identical to, the polynucleotide sequence of the original regulatory element, while still maintaining the general functionality, i.e. same or similar expression pattern, of the original regulatory element. Production of such variants of the present invention is well within the ordinary skill of the art in light of the disclosure and is encompassed within the scope of the present invention. Chimeric regulatory element “variants” comprise the same constituent elements as a reference sequence but the constituent elements comprising the chimeric regulatory element may be operatively linked by various methods known in the art such as, restriction enzyme digestion and ligation, ligation independent cloning, modular assembly of PCR products during amplification, or direct chemical synthesis of the regulatory element as well as other methods known in the art. The resulting chimeric regulatory element “variant” can be comprised of the same, or variants of the same, constituent elements of the reference sequence but differ in the sequence or sequences that comprise the linking sequence or sequences which allow the constituent parts to be operatively linked. In the present invention, a polynucleotide sequence provided as SEQ ID NOS: 1 through 323 and 352 through 924 provide a reference sequence wherein the constituent elements that comprise the reference sequence may be joined by methods known in the art and may comprise substitutions, deletions and/or insertions of one or more nucleotides or mutations that naturally occur in bacterial and plant cell transformation.

### Constructs

[0045] As used herein, the term “construct” means any recombinant polynucleotide molecule such as a plasmid, cosmid, virus, autonomously replicating polynucleotide molecule, phage, or linear or circular single-stranded or double-stranded DNA or RNA polynucleotide molecule, derived from any source, capable of genomic integration or autonomous replication, comprising a polynucleotide molecule where one or more polynucleotide molecule has been linked in a functionally operative manner, i.e. operably linked. As used herein, the term “vector” means any recombinant polynucleotide construct that may be used for the purpose of transformation, i.e. the introduction of heterologous DNA into a host cell.

[0046] As used herein, the term “operably linked” refers to a first molecule joined to a second molecule, wherein the molecules are so arranged that the first molecule affects the function of the second molecule. The two molecules may or may not be part of a single contiguous molecule and may or may not be adjacent. For example, a promoter is operably linked to a transcribable polynucleotide molecule if the promoter modulates transcription of the transcribable polynucleotide molecule of interest in a cell.

[0047] The constructs of the present invention are generally double Ti plasmid border DNA constructs that have the right border (RB or AGRtu.RB) and left border (LB or AGRtu.LB) regions of the Ti plasmid isolated from Agrobacterium tumefaciens comprising a T-DNA, that along with transfer molecules provided by the A. tumefaciens cells, permit the integration of the T-DNA into the genome of a plant cell (see, for example, U.S. Pat. No. 6,603,061). The constructs may also contain the plasmid backbone DNA segments that provide replication function and antibiotic selection in bacterial cells, for example, an Escherichia coli origin of replication such as ori322, a broad host range origin of replication such as oriV or oriRi, and a coding region for a selectable marker such as Spec/Strp that encodes for Tn7 aminoglycoside adenyltransferase (aadA) conferring resistance to spectinomycin or streptomycin, or a gentamicin (Gm, Gent) selectable marker gene. For plant transformation, the host bacterial strain is often A. tumefaciens ABI, C58, or LBA4404; however, other strains known to those skilled in the art of plant transformation can function in the present invention.

[0048] Methods are known in the art for assembling and introducing constructs into a cell in such a manner that the transcribable polynucleotide molecule is transcribed into a functional mRNA molecule that is translated and expressed as a protein product. For the practice of the present invention, conventional compositions and methods for preparing and using constructs and host cells are well known to one skilled in the art, see, for example, Molecular Cloning: A Laboratory Manual, 3^{rd} edition Volumes 1, 2, and 3 (2000) J. F. Sambrook, D. W. Russell, and N. Irwin, Cold Spring Harbor Laboratory Press. Methods for making recombinant vectors particularly suited to plant transformation include, without limitation, those described in U.S. Pat. Nos. 4,971,908; 4,940,835; 4,769,061; and 4,757,011 in their entirety. These types of vectors have also been reviewed in the scientific literature (see, for example, Rodriguez, et al., Vectors: A Survey of Molecular Cloning Vectors and Their Uses, Butterworths, Boston, (1988) and Glick, el al., Methods' in Plant Molecular Biology and Biotechnology, CRC Press, Boca Raton, FL. (1993)). Typical vectors useful for expression of nucleic acids in higher plants are well known in the art and include vectors derived from the tumor-inducing (Ti) plasmid of Agrobacterium tumefaciens (Rogers, et al., Methods in Enzymology 153: 253-277 (1987)). Other recombinant vectors useful for plant transformation, including the pCaMVCN transfer control vector, have also been described in the scientific literature (see, for example, Fromm, et al., Proc. Natl. Acad. Sci. USA 82: 5824-5828 (1985)).

[0049] Various regulatory elements may be included in a construct. Any such regulatory elements may be provided in combination with other regulatory elements. Such combinations can be designed or modified to produce desirable regulatory features. Constructs of the present invention would typically comprise at least one regulatory element operably linked to a transcribable polynucleotide molecule operably linked to a 3′ transcription termination molecule.

[0050] Constructs of the present invention may include any promoter or leader known in the art. For example, a promoter of the present invention may be operably linked to a heterologous non-translated 5′ leader such as one derived from a heat shock protein gene (see, for example, U.S. Pat. Nos. 5,659,122 and 5,362,865). Alternatively, a leader of the present invention may be operably linked to a heterologous promoter such as the Cauliflower Mosaic Virus 35S transcript promoter (see, U.S. Pat. No. 5,352,605).

[0051] As used herein, the term “intron” refers to a DNA molecule that may be isolated or identified from the genomic copy of a gene and may be defined generally as a region spliced out during mRNA processing prior to translation. Alternately, an intron may be a synthetically produced or manipulated DNA element. An intron may contain elements enhancer elements that effect the transcription of operably linked genes. An intron may be used as a regulatory element for modulating expression of an operably linked transcribable polynucleotide molecule. A DNA construct may comprise an intron, and the intron may or may not be heterologous with respect to the transcribable polynucleotide molecule sequence. Examples of introns in the art include the rice actin intron (U.S. Pat. No. 5,641,876) and the corn HSP70 intron (U.S. Pat. No. 5,859,347). Introns useful in practicing the present invention include SEQ ID NOS: 172 through 267, SEQ ID NOS: 317 through 323 and SEQ ID NOS: 589 through 778.

[0052] As used herein, the term “3′ transcription termination molecule” or “3′ UTR” refers to a DNA molecule that is used during transcription to produce the 3′ untranslated region (3′ UTR) of an mRNA molecule. The 3′ untranslated region of an mRNA molecule may be generated by specific cleavage and 3′ polyadenylation, a.k.a. polyA tail. A 3′ UTR may be operably linked to and located downstream of a transcribable polynucleotide molecule and may include polynucleotides that provide a polyadenylation signal and other regulatory signals capable of affecting transcription, mRNA processing, or gene expression. PolyA tails are thought to function in mRNA stability and in initiation of translation. Examples of 3′ transcription termination molecules in the art are the nopaline synthase 3′ region (see, Fraley, et al., Proc. Natl. Acad. Sci. USA, 80: 4803-4807 (1983)); wheat hsp17 3′ region; pea rubisco small subunit 3′ region; cotton E6 3′ region (U.S. Pat. No. 6,096,950); 3′ regions disclosed in WO0011200A2; and the coixin 3′ UTR (U.S. Pat. No. 6,635,806). Sequences of 3′ UTR regions useful in practicing the present invention are provided as SEQ ID NOS: 268 through 276 and SEQ ID NOS: 779 through 924.

[0053] 3′ UTRs are a basic prerequisite for the recombinant expression of specific genes. In animal systems, a machinery of 3′ UTRs has been well defined (e.g. Zhao et al., Microbiol Mol Biol Rev 63:405-445 (1999); Proudfoot, Nature 322:562-565 (1986); Kim et al., Biotechnology Progress 19:1620-1622 (2003); Yonaha and Proudfoot, EMBO J. 19:3770-3777 (2000); Cramer et al., FEBS Letters 498:179-182 (2001); Kuerstem and Goodwin, Nature Reviews Genetics 4:626-637 (2003)). Effective termination of RNA transcription is required to prevent unwanted transcription of trait-unrelated (downstream) sequences, which may interfere with trait performance (see below for more details). Arrangement of multiple gene expression cassettes in local proximity to one another (e.g. within one T-DNA) may cause suppression of gene expression of one or more genes in said construct in comparison to independent insertions (Padidam and Cao, BioTechniques 31:328-334 (2001)). This may interfere with achieving adequate levels of expression, for instance in cases were strong gene expression from all cassettes is desired.

[0054] In plants, clearly defined polyadenylation signal sequences are not known. Hasegawa et al., Plant J. 33:1063-1072, (2003)) were not able to identify conserved polyadenylation signal sequences in both in vitro and in vivo systems in Nicotiana sylvestris and to determine the actual length of the primary (non-polyadenylated) transcript. A weak 3′ UTR has the potential to generate read-through, which may affect the expression of the genes located in the neighboring expression cassettes (Padidam and Cao, BioTechniques 31:328-334 (2001)). Appropriate control of transcription termination can prevent read-through into sequences (e.g. other expression cassettes) localized downstream and can further allow efficient recycling of RNA polymerase, to improve gene expression. Efficient termination of transcription (release of RNA Polymerase II from the DNA) is pre-requisite for re-initiation of transcription and thereby directly affects the overall transcript level. Subsequent to transcription termination, the mature mRNA is released from the site of synthesis and template to the cytoplasm. Eukaryotic mRNAs are accumulated as poly(A) forms in vivo, so that it is difficult to detect transcriptional termination sites by conventional methods. However, prediction of functional and efficient 3′ UTRs by bioinformatics methods is difficult in that there are no conserved sequences which would allow easy prediction of an effective 3′ UTR.

[0055] From a practical standpoint, it is preferred that a 3′ UTR used in a transgene cassette possesses the following characteristics. The 3′ UTR must be able to efficiently and effectively terminate transcription of the transgene and prevent read-through of the transcript into any neighboring DNA sequence which can be comprised of another transgene cassette as in the case of multiple cassettes residing in one T-DNA, or the neighboring chromosomal DNA into which the T-DNA has inserted. The 3′ UTR should not cause a reduction in the transcriptional activity imparted by the promoter, leader and introns that are used to drive expression of the transgene. In plant biotechnology, the 3′ UTR is often used for priming of amplification reactions of reverse transcribed RNA extracted from the transformed plant and used to (1) assess the transcriptional activity or expression of the transgene cassette once integrated into the plant chromosome; (2) assess the copy number of insertions within the plant DNA; and (3) assess zygosity of the resulting seed after breeding. The 3′ UTR is also used in amplification reactions of DNA extracted from the transformed plant to characterize the intactness of the inserted cassette.

[0056] 3′ UTRs useful in providing expression of a transgene in plants are identified based upon the expression of expressed sequence tags (ESTs) in cDNA libraries made from messenger RNA isolated from seed, flower and other tissues derived from Foxtail millet (Setaria italica (L.) Beauv). Libraries of cDNA are made from tissues isolated from S. italica using methods known to those skilled in the art from flower tissue, seed, leaf and root. The resulting cDNAs are sequenced using various sequencing methods known in the art. The resulting ESTs are assembled into clusters using bioinformatics software such as cic_ref_assemble_complete version 2.01.37139 (CLC bio USA, Cambridge, Massachusetts 02142). Transcript abundance of each cluster is determined by counting the number of cDNA reads for each cluster. The identified 3′ UTRs may be comprised of sequence derived from cDNA sequence as well as sequence derived from genomic DNA. The cDNA sequence is used to design primers, which are then used with GenomeWalker™ (Clontech Laboratories, Inc, Mountain View, CA) libraries constructed following the manufacturer's protocol to clone the 3′ region of the corresponding genomic DNA sequence to provide a longer termination sequence. Analysis of relative transcript abundance either by direct counts or normalized counts of observed sequence reads for each tissue library can be used to infer properties about patters of expression. For example, some 3′ UTRs may be found in transcripts seen in higher abundance in root tissue as opposed to leaf. This is suggestive that the transcript is highly expressed in root and that the properties of root expression may be attributable to the transcriptional regulation of the promoter, the lead, the introns or the 3′ UTR. Empirical testing of 3′ UTRs identified by the properties of expression within specific organs, tissues or cell types can result in the identification of 3′ UTRs that enhance expression in those specific organs, tissues or cell types.

[0057] Constructs and vectors may also include a transit peptide coding sequence that expresses a linked peptide that is useful for targeting of a protein product, particularly to a chloroplast, leucoplast, or other plastid organelle; mitochondria; peroxisome; vacuole; or an extracellular location. For descriptions of the use of chloroplast transit peptides, see U.S. Pat. Nos. 5,188,642 and 5,728,925. Many chloroplast-localized proteins are expressed from nuclear genes as precursors and are targeted to the chloroplast by a chloroplast transit peptide (CTP). Examples of such isolated chloroplast proteins include, but are not limited to, those associated with the small subunit (SSU) of ribulose-1,5,-bisphosphate carboxylase, ferredoxin, ferredoxin oxidoreductase, the light-harvesting complex protein I and protein II, thioredoxin F, enolpyruvyl shikimate phosphate synthase (EPSPS), and transit peptides described in U.S. Pat. No. 7,193,133. It has been demonstrated in vivo and in vitro that non-chloroplast proteins may be targeted to the chloroplast by use of protein fusions with a heterologous CTP and that the CTP is sufficient to target a protein to the chloroplast. Incorporation of a suitable chloroplast transit peptide such as the Arabidopsis thaliana EPSPS CTP (CTP2) (See, Klee et al., Mol. Gen. Genet. 210:437-442 (1987)) or the Petunia hybrida EPSPS CTP (CTP4) (See, della-Cioppa et al., Proc. Natl. Acad. Sci. USA 83:6873-6877 (1986)) has been show to target heterologous EPSPS protein sequences to chloroplasts in transgenic plants (See, U.S. Pat. Nos. 5,627,061; 5,633,435; and 5,312,910 and EP 0218571; EP 189707; EP 508909; and EP 924299). Sequences encoding transit peptides useful for the present invention are provided as SEQ ID NOS: 277 through 316. Protein sequences of transit peptides useful for the present invention are provided as SEQ ID NOS: 324 through 350.

### Transcribable Polynucleotide Molecules

[0058] As used herein, the term “transcribable polynucleotide molecule” refers to any DNA molecule capable of being transcribed into a RNA molecule, including, but not limited to, those having protein coding sequences and those having sequences useful for gene suppression. A “transgene” refers to a transcribable polynucleotide molecule heterologous to a host cell and/or a transcribable polynucleotide molecule artificially incorporated into a host cell's genome.

[0059] A promoter of the present invention may be operably linked to a transcribable polynucleotide molecule that is heterologous with respect to the promoter molecule. As used herein, the term “heterologous” refers to the combination of two or more polynucleotide molecules when such a combination would not normally be found in nature. For example, the two molecules may be derived from different species and/or the two molecules may be derived from different genes, e.g. different genes from the same species or the same genes from different species. A promoter is thus heterologous with respect to an operably linked transcribable polynucleotide molecule if such a combination is not normally found in nature, i.e. that transcribable polynucleotide molecule is not naturally occurring operably linked in combination with that promoter molecule.

[0060] The transcribable polynucleotide molecule may generally be any DNA molecule for which expression of an RNA transcript is desired. Such expression of an RNA transcript may result in translation of the resulting mRNA molecule and thus protein expression. Alternatively, a transcribable polynucleotide molecule may be designed to ultimately cause decreased expression of a specific gene or protein. This may be accomplished by using a transcribable polynucleotide molecule that is oriented in the antisense direction. One of ordinary skill in the art is familiar with using such antisense technology. Briefly, as the antisense transcribable polynucleotide molecule is transcribed, the RNA product hybridizes to and sequesters a complimentary RNA molecule inside the cell. This duplex RNA molecule cannot be translated into a protein by the cell's translational machinery and is degraded in the cell. Any gene may be negatively regulated in this manner.

[0061] Thus, one embodiment of the invention is a regulatory element of the present invention, such as those provided as SEQ ID NOS: 1 through 276, SEQ ID NOS: 317 through 323 and 352 through 924, operably linked to a transcribable polynucleotide molecule so as to modulate transcription of the transcribable polynucleotide molecule at a desired level or in a desired pattern upon introduction of said construct into a plant cell. In one embodiment, the transcribable polynucleotide molecule comprises a protein-coding region of a gene, and the promoter affects the transcription of an RNA molecule that is translated and expressed as a protein product. In another embodiment, the transcribable polynucleotide molecule comprises an antisense region of a gene, and the promoter affects the transcription of an antisense RNA molecule or other similar inhibitory RNA molecule in order to inhibit expression of a specific RNA molecule of interest in a target host cell.

### Genes of Agronomic Interest

[0062] Transcribable polynucleotide molecules may be genes of agronomic interest. As used herein, the term “gene of agronomic interest” refers to a transcribable polynucleotide molecule that when expressed in a particular plant tissue, cell, or cell type provides a desirable characteristic associated with plant morphology, physiology, growth, development, yield, product, nutritional profile, disease or pest resistance, and/or environmental or chemical tolerance. Genes of agronomic interest include, but are not limited to, those encoding a yield protein, a stress resistance protein, a developmental control protein, a tissue differentiation protein, a meristem protein, an environmentally responsive protein, a senescence protein, a hormone responsive protein, an abscission protein, a source protein, a sink protein, a flower control protein, a seed protein, an herbicide resistance protein, a disease resistance protein, a fatty acid biosynthetic enzyme, a tocopherol biosynthetic enzyme, an amino acid biosynthetic enzyme, a pesticidal protein, or any other agent such as an antisense or RNAi molecule targeting a particular gene for suppression. The product of a gene of agronomic interest may act within the plant in order to cause an effect upon the plant physiology or metabolism or may be act as a pesticidal agent in the diet of a pest that feeds on the plant.

[0063] In one embodiment of the invention, a promoter of the present invention is incorporated into a construct such that the promoter is operably linked to a transcribable polynucleotide molecule that is a gene of agronomic interest. The expression of the gene of agronomic interest is desirable in order to confer an agronomically beneficial trait. A beneficial agronomic trait may be, for example, but not limited to, herbicide tolerance, insect control, modified yield, fungal disease resistance, virus resistance, nematode resistance, bacterial disease resistance, plant growth and development, starch production, modified oils production, high oil production, modified fatty acid content, high protein production, fruit ripening, enhanced animal and human nutrition, biopolymers, environmental stress resistance, pharmaceutical peptides and secretable peptides, improved processing traits, improved digestibility, enzyme production, flavor, nitrogen fixation, hybrid seed production, fiber production, and biofuel production. Examples of genes of agronomic interest known in the art include those for herbicide resistance (U.S. Pat. Nos. 6,803,501; 6,448,476; 6,248,876; 6,225,114; 6,107,549; 5,866,775; 5,804,425; 5,633,435; and 5,463,175), increased yield (U.S. Pat. Nos. USRE38,446; 6,716,474; 6,663,906; 6,476,295; 6,441,277; 6,423,828; 6,399,330; 6,372,211; 6,235,971; 6,222,098; and 5,716,837), insect control (U.S. Pat. Nos. 6,809,078; 6,713,063; 6,686,452; 6,657,046; 6,645,497; 6,642,030; 6,639,054; 6,620,988; 6,593,293; 6,555,655; 6,538,109; 6,537,756; 6,521,442; 6,501,009; 6,468,523; 6,326,351; 6,313,378; 6,284,949; 6,281,016; 6,248,536; 6,242,241; 6,221,649; 6,177,615; 6,156,573; 6,153,814; 6,110,464; 6,093,695; 6,063,756; 6,063,597; 6,023,013; 5,959,091; 5,942,664; 5,942,658, 5,880,275; 5,763,245; and 5,763,241), fungal disease resistance (U.S. Pat. Nos. 6,653,280; 6,573,361; 6,506,962; 6,316,407; 6,215,048; 5,516,671; 5,773,696; 6,121,436; 6,316,407; and 6,506,962), virus resistance (U.S. Pat. Nos. 6,617,496; 6,608,241; 6,015,940; 6,013,864; 5,850,023; and 5,304,730), nematode resistance (U.S. Pat. No. 6,228,992), bacterial disease resistance (U.S. Pat. No. 5,516,671), plant growth and development (U.S. Pat. Nos. 6,723,897 and 6,518,488), starch production (U.S. Pat. Nos. 6,538,181; 6,538,179; 6,538,178; 5,750,876; 6,476,295), modified oils production (U.S. Pat. Nos. 6,444,876; 6,426,447; and 6,380,462), high oil production (U.S. Pat. Nos. 6,495,739; 5,608,149; 6,483,008; and 6,476,295), modified fatty acid content (U.S. Pat. Nos. 6,828,475; 6,822,141; 6,770,465; 6,706,950; 6,660,849; 6,596,538; 6,589,767; 6,537,750; 6,489,461; and 6,459,018), high protein production (U.S. Pat. No. 6,380,466), fruit ripening (U.S. Pat. No. 5,512,466), enhanced animal and human nutrition (U.S. Pat. Nos. 6,723,837; 6,653,530; 6,5412,59; 5,985,605; and 6,171,640), biopolymers (U.S. Pat. Nos. USRE37,543; 6,228,623; and U.S. Pat. Nos. 5,958,745, and 6,946,588), environmental stress resistance (U.S. Pat. No. 6,072,103), pharmaceutical peptides and secretable peptides (U.S. Pat. Nos. 6,812,379; 6,774,283; 6,140,075; and 6,080,560), improved processing traits (U.S. Pat. No. 6,476,295), improved digestibility (U.S. Pat. No. 6,531,648) low raffinose (U.S. Pat. No. 6,166,292), industrial enzyme production (U.S. Pat. No. 5,543,576), improved flavor (U.S. Pat. No. 6,011,199), nitrogen fixation (U.S. Pat. No. 5,229,114), hybrid seed production (U.S. Pat. No. 5,689,041), fiber production (U.S. Pat. Nos. 6,576,818; 6,271,443; 5,981,834; and 5,869,720) and biofuel production (U.S. Pat. No. 5,998,700).

[0064] Alternatively, a gene of agronomic interest can affect the above mentioned plant characteristic or phenotype by encoding a RNA molecule that causes the targeted modulation of gene expression of an endogenous gene, for example via antisense (see e.g. U.S. Pat. No. 5,107,065); inhibitory RNA (“RNAi”, including modulation of gene expression via miRNA-, siRNA-, trans-acting siRNA-, and phased sRNA-mediated mechanisms, e.g. as described in published applications US 2006/0200878 and US 2008/0066206, and in U.S. patent application Ser. No. 11/974,469); or cosuppression-mediated mechanisms. The RNA could also be a catalytic RNA molecule (e.g. a ribozyme or a riboswitch; see e.g. US 2006/0200878) engineered to cleave a desired endogenous mRNA product. Thus, any transcribable polynucleotide molecule that encodes a transcribed RNA molecule that affects an agronomically important phenotype or morphology change of interest may be useful for the practice of the present invention. Methods are known in the art for constructing and introducing constructs into a cell in such a manner that the transcribable polynucleotide molecule is transcribed into a molecule that is capable of causing gene suppression. For example, posttranscriptional gene suppression using a construct with an anti-sense oriented transcribable polynucleotide molecule to regulate gene expression in plant cells is disclosed in U.S. Pat. Nos. 5,107,065 and 5,759,829, and posttranscriptional gene suppression using a construct with a sense-oriented transcribable polynucleotide molecule to regulate gene expression in plants is disclosed in U.S. Pat. Nos. 5,283,184 and 5,231,020. Expression of a transcribable polynucleotide in a plant cell can also be used to suppress plant pests feeding on the plant cell, for example, compositions isolated from coleopteran pests (U.S. Patent Publication No. US20070124836) and compositions isolated from nematode pests (U.S. Patent Publication No. US20070250947). Plant pests include, but are not limited to arthropod pests, nematode pests, and fungal or microbial pests. Exemplary transcribable polynucleotide molecules for incorporation into constructs of the present invention include, for example, DNA molecules or genes from a species other than the target species or genes that originate with or are present in the same species, but are incorporated into recipient cells by genetic engineering methods rather than classical reproduction or breeding techniques. The type of polynucleotide molecule can include, but is not limited to, a polynucleotide molecule that is already present in the plant cell, a polynucleotide molecule from another plant, a polynucleotide molecule from a different organism, or a polynucleotide molecule generated externally, such as a polynucleotide molecule containing an antisense message of a gene, or a polynucleotide molecule encoding an artificial, synthetic, or otherwise modified version of a transgene.

### Selectable Markers

[0065] As used herein the term “marker” refers to any transcribable polynucleotide molecule whose expression, or lack thereof, can be screened for or scored in some way. Marker genes for use in the practice of the present invention include, but are not limited to transcribable polynucleotide molecules encoding β-glucuronidase (GUS described in U.S. Pat. No. 5,599,670), green fluorescent protein and variants thereof (GFP described in U.S. Pat. Nos. 5,491,084 and 6,146,826), proteins that confer antibiotic resistance, or proteins that confer herbicide tolerance. Useful antibiotic resistance markers, including those encoding proteins conferring resistance to kanamycin (nptII), hygromycin B (aph IV), streptomycin or spectinomycin (aad, spec/strep) and gentamycin (aac3 and aacC4) are known in the art. Herbicides for which transgenic plant tolerance has been demonstrated and the method of the present invention can be applied, include, but are not limited to: amino-methyl-phosphonic acid, glyphosate, glufosinate, sulfonylureas, imidazolinones, bromoxynil, delapon, dicamba, cyclohezanedione, protoporphyrinogen oxidase inhibitors, and isoxasflutole herbicides. Transcribable polynucleotide molecules encoding proteins involved in herbicide tolerance are known in the art, and include, but are not limited to, a transcribable polynucleotide molecule encoding 5-enolpyruvylshikimate-3-phosphate synthase (EPSPS for glyphosate tolerance described in U.S. Pat. Nos. 5,627,061; 5,633,435; 6,040,497; and 5,094,945); a transcribable polynucleotide molecule encoding a glyphosate oxidoreductase and a glyphosate-N-acetyl transferase (GOX described in U.S. Pat. No. 5,463,175; GAT described in U.S. Patent publication No. 20030083480, and dicamba monooxygenase U.S. Patent publication No. 20030135879); a transcribable polynucleotide molecule encoding bromoxynil nitrilase (Bxn for Bromoxynil tolerance described in U.S. Pat. No. 4,810,648); a transcribable polynucleotide molecule encoding phytoene desaturase (crtI) described in Misawa, et al., Plant Journal 4:833-840 (1993) and Misawa, et al., Plant Journal 6:481-489 (1994) for norflurazon tolerance; a transcribable polynucleotide molecule encoding acetohydroxyacid synthase (AHAS, aka ALS) described in Sathasiivan, et al., Nucl. Acids Res. 18:2188-2193 (1990) for tolerance to sulfonylurea herbicides; and the bar gene described in DeBlock, et al., EMBO Journal 6:2513-2519 (1987) for glufosinate and bialaphos tolerance. The promoter molecules of the present invention can express linked transcribable polynucleotide molecules that encode for phosphinothricin acetyltransferase, glyphosate resistant EPSPS, aminoglycoside phosphotransferase, hydroxyphenyl pyruvate dehydrogenase, hygromycin phosphotransferase, neomycin phosphotransferase, dalapon dehalogenase, bromoxynil resistant nitrilase, anthranilate synthase, aryloxyalkanoate dioxygenases, acetyl CoA carboxylase, glyphosate oxidoreductase, and glyphosate-N-acetyl transferase.

[0066] Included within the term “selectable markers” are also genes which encode a secretable marker whose secretion can be detected as a means of identifying or selecting for transformed cells. Examples include markers that encode a secretable antigen that can be identified by antibody interaction, or even secretable enzymes which can be detected catalytically. Selectable secreted marker proteins fall into a number of classes, including small, diffusible proteins which are detectable, (e.g. by ELISA), small active enzymes which are detectable in extracellular solution (e.g, alpha-amylase, beta-lactamase, phosphinothricin transferase), or proteins which are inserted or trapped in the cell wall (such as proteins which include a leader sequence such as that found in the expression unit of extension or tobacco pathogenesis related proteins also known as tobacco PR-S). Other possible selectable marker genes will be apparent to those of skill in the art and are encompassed by the present invention.

### Cell Transformation

[0067] The invention is also directed to a method of producing transformed cells and plants which comprise a promoter operably linked to a transcribable polynucleotide molecule.

[0068] The term “transformation” refers to the introduction of nucleic acid into a recipient host. As used herein, the term “host” refers to bacteria, fungi, or plant, including any cells, tissue, organs, or progeny of the bacteria, fungi, or plant. Plant tissues and cells of particular interest include protoplasts, calli, roots, tubers, seeds, stems, leaves, seedlings, embryos, and pollen.

[0069] As used herein, the term “transformed” refers to a cell, tissue, organ, or organism into which a foreign polynucleotide molecule, such as a construct, has been introduced. The introduced polynucleotide molecule may be integrated into the genomic DNA of the recipient cell, tissue, organ, or organism such that the introduced polynucleotide molecule is inherited by subsequent progeny. A “transgenic” or “transformed” cell or organism also includes progeny of the cell or organism and progeny produced from a breeding program employing such a transgenic organism as a parent in a cross and exhibiting an altered phenotype resulting from the presence of a foreign polynucleotide molecule. The term “transgenic” refers to a bacteria, fungi, or plant containing one or more heterologous polynucleic acid molecules.

[0070] There are many methods for introducing polynucleic acid molecules into plant cells. The method generally comprises the steps of selecting a suitable host cell, transforming the host cell with a recombinant vector, and obtaining the transformed host cell. Suitable methods include bacterial infection (e.g. Agrobacterium), binary bacterial artificial chromosome vectors, direct delivery of DNA (e.g. via PEG-mediated transformation, desiccation/inhibition-mediated DNA uptake, electroporation, agitation with silicon carbide fibers, and acceleration of DNA coated particles, etc. (reviewed in Potrykus, et al., Ann. Rev. Plant Physiol. Plant Mol. Biol. 42: 205 (1991)).

[0071] Technology for introduction of a DNA molecule into cells is well known to those of skill in the art. Methods and materials for transforming plant cells by introducing a plant DNA construct into a plant genome in the practice of this invention can include any of the well-known and demonstrated methods including, but not limited to:
[0072] (1) chemical methods (Graham and Van der Eb, Virology 54:536-539 (1973) and Zatloukal, et al., Ann. N.Y. Acad. Sci. 660: 136-153 (1992));
[0073] (2) physical methods such as microinjection (Capecchi, Cell 22:479-488 (1980)), electroporation (Wong and Neumann, Biochim. Biophys. Res. Commun., 107:584-587 (1982); Fromm, et al, Proc. Natl. Acad. Sci. USA 82:5824-5828 (1985); U.S. Pat. No. 5,384,253) particle acceleration (Johnston and Tang, Methods Cell Biol. 43(A):353-365 (1994); Fynan, et al., Proc. Natl. Acad. Sci. USA 90:11478-11482 (1993)): and microprojectile bombardment (as illustrated in U.S. Pat. Nos. 5,015,580; 5,550,318; 5,538,880; 6,160,208; 6,399,861; and 6,403,865);
[0074] (3) viral vectors (Clapp, Clin. Perinatol. 20:155-168 (1993); Lu, et al., J. Exp. Med. 178:2089-2096 (1993); Eglitis and Anderson, Biotechniques 6:608-614 (1988));
[0075] (4) receptor-mediated mechanisms (Curiel et al., Hum. Gen. Ther. 3:147-154 (1992) and Wagner, et al., Proc. Natl. Acad. Sci. USA 89:6099-6103 (1992); (5) bacterial mediated mechanisms such as Agrobacterium-mediated transformation (as illustrated in U.S. Pat. Nos. 5,824,877; 5,591,616; 5,981,840; and 6,384,301); direct introduction into pollen by injecting a plant's reproductive organs (Zhou, et al., Methods in Enzymology 101:433, (1983); Hess, Intern Rev. Cytol. 107:367 (1987); Luo, et al., Plant Mol Biol. Reporter 6:165 (1988); Pena, et al., Nature 325:274 (1987));
[0076] (7) protoplast transformation (as illustrated in U.S. Pat. No. 5,508,184); and
[0077] (8) injection into immature embryos (Neuhaus, et al., Theor. Appl. Genet. 75:30 (1987)).

[0078] Any of the above described methods may be utilized to transform a host cell with one or more promoters and/or constructs of the present. Host cells may be any cell or organism such as a plant cell, algae cell, algae, fungal cell, fungi, bacterial cell, or insect cell. Preferred hosts and transformed cells include cells from: plants, Aspergillus, yeasts, insects, bacteria and algae.

[0079] Methods for transforming dicotyledonous plants, primarily by use of Agrobacterium tumefaciens and obtaining transgenic plants have been published for cotton (U.S. Pat. Nos. 5,004,863; 5,159,135; and 5,518,908); soybean (U.S. Pat. Nos. 5,569,834 and 5,416,011; see also, McCabe, et al., Biotechnolgy 6:923 (1988) and Christou et al., Plant Physiol. 87:671-674 (1988)); Brassica (U.S. Pat. No. 5,463,174); peanut (Cheng et al., Plant Cell Rep. 15:653-657 (1996) and McKently et al., Plant Cell Rep. 14:699-703 (1995)); papaya; and pea (Grant et al., Plant Cell Rep. 15:254-258 (1995)).

[0080] Transformations of monocotyledon plants using electroporation, particle bombardment, and Agrobacterium have also been reported. Transformation and plant regeneration have been achieved in asparagus (Bytebier, et al., Proc. Natl. Acad. Sci. (USA) 84:5354 (1987); barley (Wan and Lemaux, Plant Physiol. 104:37 (1994)); maize (Rhodes, et al., Science 240:204 (1988), Gordon-Kamm, et al., Plant Cell 2:603-618 (1990), Fromm, et al., Bio/Technology, 8:833 (1990), Koziel et al., Bio/Technology 11:194 (1993), and Armstrong, et al., Crop Science 35:550-557 (1995)); oat (Somers, et al., Bio/Technology 10:1589 (1992)); orchard grass (Horn, et al., Plant Cell Rep. 7:469 (1988)); rye (De la Pena, et al., Nature, 325:274 (1987)); sugarcane (Bower and Birch, Plant Journal 2:409 (1992)); tall fescue (Wang, et al., Bio/Technology 10:691 (1992)); and wheat (Vasil, et al., Bio/Technology 10:667 (1992) and U.S. Pat. No. 5,631,152).

[0081] The regeneration, development, and cultivation of plants from transformed plant protoplast or explants is well known in the art (see, for example, Weissbach and Weissbach, Methods for Plant Molecular Biology, (Eds.), Academic Press, Inc., San Diego, CA (1988) and Horsch et al., Science 227:1229-1231 (1985)). Transformed cells are generally cultured in the presence of a selective media, which selects for the successfully transformed cells and induces the regeneration of plant shoots and roots into intact plants (Fraley, et al., Proc. Natl. Acad. Sci. U.S.A. 80: 4803 (1983)). Transformed plants are typically obtained within two to four months.

[0082] The regenerated transgenic plants are self-pollinated to provide homozygous transgenic plants. Alternatively, pollen obtained from the regenerated transgenic plants may be crossed with non-transgenic plants, preferably inbred lines of agronomically important species. Descriptions of breeding methods that are commonly used for different traits and crops can be found in one of several reference books, see, for example, Allard, Principles of Plant Breeding, John Wiley & Sons, NY, U. of CA, Davis, CA, 50-98 (1960); Simmonds, Principles of crop improvement, Longman, Inc., NY, 369-399 (1979); Sneep and Hendriksen, Plant breeding perspectives, Wageningen (ed), Center for Agricultural Publishing and Documentation (1979); Fehr, Soybeans: Improvement, Production and Uses, 2nd Edition, Monograph, 16:249 (1987); Fehr, Principles of variety development, Theory and Technique, (Vol. 1) and Crop Species Soybean (Vol 2), Iowa State Univ., Macmillan Pub. Co., NY, 360-376 (1987). Conversely, pollen from non-transgenic plants may be used to pollinate the regenerated transgenic plants.

[0083] The transformed plants may be analyzed for the presence of the genes of interest and the expression level and/or profile conferred by the regulatory elements of the present invention. Those of skill in the art are aware of the numerous methods available for the analysis of transformed plants. For example, methods for plant analysis include, but are not limited to Southern blots or northern blots, PCR-based approaches, biochemical analyses, phenotypic screening methods, field evaluations, and immunodiagnostic assays. The expression of a transcribable polynucleotide molecule can be measured using TaqMan® (Applied Biosystems, Foster City, CA) reagents and methods as described by the manufacturer and PCR cycle times determined using the TaqMan® Testing Matrix. Alternatively, the Invader® (Third Wave Technologies, Madison, WI) reagents and methods as described by the manufacturer can be used transgene expression.

[0084] The seeds of the plants of this invention can be harvested from fertile transgenic plants and be used to grow progeny generations of transformed plants of this invention including hybrid plant lines comprising the construct of this invention and expressing a gene of agronomic interest.

[0085] The present invention also provides for parts of the plants of the present invention. Plant parts, without limitation, include leaves, stems, roots, tubers, seeds, endosperm, ovule, and pollen. The invention also includes and provides transformed plant cells which comprise a nucleic acid molecule of the present invention.

[0086] The transgenic plant may pass along the transgenic polynucleotide molecule to its progeny. Progeny includes any regenerable plant part or seed comprising the transgene derived from an ancestor plant. The transgenic plant is preferably homozygous for the transformed polynucleotide molecule and transmits that sequence to all offspring as a result of sexual reproduction. Progeny may be grown from seeds produced by the transgenic plant. These additional plants may then be self-pollinated to generate a true breeding line of plants. The progeny from these plants are evaluated, among other things, for gene expression. The gene expression may be detected by several common methods such as western blotting, northern blotting, immuno-precipitation, and ELISA.

[0087] Having now generally described the invention, the same will be more readily understood through reference to the following examples which are provided by way of illustration, and are not intended to be limiting of the present invention, unless specified. It should be appreciated by those of skill in the art that the techniques disclosed in the following examples represent techniques discovered by the inventors to function well in the practice of the invention. However, those of skill in the art should, in light of the present disclosure, appreciate that many changes can be made in the specific embodiments that are disclosed and still obtain a like or similar result without departing from the spirit and scope of the invention, therefore all matter set forth or shown in the accompanying drawings is to be interpreted as illustrative and not in a limiting sense.

### EXAMPLES

[0088] Regulatory elements useful to drive expression of an operably linked transcribable polynucleotide in transgenic plants were isolated, and the expression pattern of these regulatory elements operably linked to a transcribable polynucleotide molecule was analyzed in transgenic soy plants.

### Example 1: Identification and Cloning of Novel Regulatory Elements: Promoters, Leaders and Introns

[0089] Regulatory elements were identified and isolated from genomic DNA of the monocot species, Foxtail millet (Setaria italica (L.) Beauv). Proprietary genomic and EST and public genomic and EST sequence was used to design primers, which were then used with GenomeWalker™ (Clontech Laboratories, Inc, Mountain View, CA) libraries constructed following the manufacturer's protocol to clone the 5′ region of the corresponding genomic DNA sequence. In the case of promoters leaders and introns, this cloned region comprised the 5′ transctiptional regulatory, 5′ UTR and if present, intron sequence upstream of the protein-coding region for each gene from S. italica. Using this sequence, regulatory elements were bioinformatically identified within the 5′ region for each gene. Bioinformatic analysis was used to identify the transcriptional start site (TSS) and any bi-directionality, introns, or upstream coding sequence present in the sequence. Using the results of this analysis, regulatory elements were defined within the 5′ sequence upstream of the coding sequence of the gene. Primers were then designed to amplify the regulatory elements. The corresponding DNA molecule for each regulatory element was amplified using standard polymerase chain reaction conditions with primers containing unique restriction enzyme sites and genomic DNA isolated from S. italica. The resulting DNA fragments were ligated into a base plant expression vector using standard restriction enzyme digestion of compatible restriction sites and DNA ligation methods.

[0090] Sequences of regulatory elements, transit peptide encoding elements and transit peptide protein sequences identified from S. italica are listed in Table 1 below. Sequences of the regulatory elements identified from S. italica are provided herein as SEQ ID NOS: 1 through 276, SEQ ID NOS: 317 through 323 and 352 through 924. Transcriptional regulatory element groups (EXP) comprised of a promoter, leader and intron operably linked or a promoter, leader, intron and leader operably linked are provided herein as SEQ ID NOS: 1 through 22. Promoter sequences are provided herein as SEQ ID NOS: 23 through 105 and SEQ ID NOS: 353 through 536. Leader sequences are provided herein as SEQ ID NOS: 106 through 171 and SEQ ID NOS: 537 through 588. Intron sequences are provided as SEQ ID NOS: 172 through 267, SEQ ID NOS: 317 through 323 and SEQ ID NOS: 589 through 778. Sequences comprising 3′ UTRs are provided herein as SEQ ID NOS: 268 through 276 and SEQ ID NOS: 779 through 924. Sequences encoding transit peptides are provided herein as SEQ ID NOS: 277 through 316. The genomic DNA encoding some of the transit peptides also are comprised by introns presented as SEQ ID NOS: 317 through 323. Transit peptide protein sequences are provided herein as SEQ ID NOS: 324 through 350. An enhancer element is provided as SEQ ID NO: 352.

TABLE 1
Regulatory elements and corresponding promoters, leaders
and introns; and transit (localization) sequences.

| | SEQ | |
|---|---|---|
| | ID | |
| Annotation | NO: | Description |
| EXP-FMV.35S-SETit.Ccoamt | 1 | Enhanced Caffeoyl CoA |
| | | methyltransferase |
| EXP-FMV.35S-SETit.Gst:a | 2 | Enhanced Glutathione S- |
| | | transferase |
| EXP-FMV.35S-SETit.Gst:b | 3 | Enhanced Glutathione S- |
| | | transferase |
| EXP-FMV.35S-SETit.Ifr | 4 | Enhanced Isoflavone Reducatase |
| EXP-FMV.35S-SETit.Pox | 5 | Enhanced Peroxidase |
| EXP-FMV.35S-SETit.Rcc3:a | 6 | Enhanced Lipid Transfer |
| | | Protein-RCc3 |
| EXP-FMV.35S-SETit.Rcc3:b | 7 | Enhanced Lipid Transfer |
| | | Protein-RCc3 |
| EXP-FMV.35S-SETit.Tip | 8 | Enhanced Tonoplast intrinsic |
| | | protein |
| EXP-SETit.Act8:1:1 | 9 | Actin 8 |
| EXP-SETit.Act8:1:2 | 10 | Actin 8 |
| EXP-SETit.Act8:c | 11 | Actin 8-1 |
| EXP-SETit.CLUS120796-1 | 12 | Cluster 120796-1 |
| EXP-SETit.CLUS19108 | 13 | Cluster 19108 |
| EXP-SETit.Ppdk:1:1 | 14 | Pyruvate orthophosphate dikinase |
| EXP-SETit.TubA2:1:1 | 15 | Tubulin A2 |
| EXP-SETit.TubA2:1:3 | 16 | Tubulin A2 |
| EXP-SETit.TubA2-1:1:2 | 17 | Tubulin A2-1 |
| EXP-SETit.TubA2-2:1:1 | 18 | Tubulin A2-2 |
| EXP-SETit.TubA3:1:3 | 19 | Tubulin A3 |
| EXP-SETit.Ubq1:1:1 | 20 | Ubiquitin 1 |
| EXP-SETit.Ubq1:1:3 | 21 | Ubiquitin 1 |
| EXP-SETit.Ubq5 | 22 | Ubiquitin 5 |
| P-SETit.25509-1:1:3 | 23 | Cluster 25509 |
| P-SETit.Act8-1:1:5 | 24 | Actin 8 |
| P-SETit.Act8-1:1:6 | 25 | Actin 8 |
| P-SETit.Act8-1-1:1:2 | 26 | Actin 8-1 |
| P-SETit.Aip-1:1:1 | 27 | Auxin-induced protein |
| P-SETit.Alc1-1:1:1 | 28 | Alpha-coixin |
| P-SETit.Alc1-1:1:2 | 29 | Alpha-coixin |
| P-SETit.Alc2-1:1:2 | 30 | Alpha-coixin |
| P-SETit.Ali1-1:1:3 | 31 | Aluminum-induced protein |
| P-SETit.Cab1-1:1:1 | 32 | Chlorophyll a/b binding protein-1 |
| P-SETit.Cab3-1:1:3 | 33 | Chlorophyll a/b binding protein-3 |
| P-SETit.Cb17-1:1:1 | 34 | Calcineurin B-like protein |
| P-SETit.Ccoamt-1:1:2 | 35 | Cafeoyl CoA methyltransferase |
| P-SETit.Cda-1:1:1 | 36 | Cell death associated protein |
| P-SETit.CLUS1164825-1-1:1:1 | 37 | Cluster 1164825-1 |
| P-SETit.CLUS1165324-1:1:1 | 38 | Cluster 1165324-1 |
| P-SETit.CLUS120796-1-1:1:1 | 39 | Cluster 120796-1 |
| P-SETit.CLUS19108-1:1:2 | 40 | Cluster 19108 |
| P-SETit.CLUS882664-1-1:1:2 | 41 | Cluster 882664-1 |
| P-SETit.CP29-1:1:4 | 42 | Chloroplast protein-29 |
| P-SETit.Cyp-1-1:1:1 | 43 | Cysteine protease-1 |
| P-SETit.Cyp78a-1:1:2 | 44 | Cysteine protease-78a |
| P-SETit.Cys-1:1:2 | 45 | Cysteine synthase |
| P-SETit.Cys-1:1:3 | 46 | Cysteine synthase |
| P-SETit.Dzs-1:1:4 | 47 | Delta zein storage protein |
| P-SETit.Dzs-1:1:5 | 48 | Delta zein storage protein |
| P-SETit.Eie-1:1:1 | 49 | Elongation Factor |
| P-SETit.EST CLUS675389-2- | 50 | Cluster 675389-2 |
| 1:1:2 | | |
| P-SETit.Fba-1:1:1 | 51 | Fructose-bisphosphate aldolase |
| P-SETit.FM54-1:1:2 | 52 | Cluster 1102871_1 |
| P-SETit.FM63-1:1:2 | 53 | Cluster 1019870_1 |
| P-SETit.Fst-1:1:1 | 54 | Flavonol 4-sulfotransferase |
| P-SETit.Gapdh2-1:1:3 | 55 | Glyceraldehyde-3-phosphate |
| | | dehydrogenase |
| P-SETit.Grcw2-1:1:1 | 56 | Glycine-rich cell wall |
| | | structural protein 2 |
| P-SETit.Grf-1:1:2 | 57 | Putative growth-regulating factor |
| P-SETit.Gst-1:1:1 | 58 | Glutathione S-transferase |
| P-SETit.Gst-1:1:2 | 59 | Glutathione S-transferase |
| P-SETit.Ifr-1:1:2 | 60 | Isoflavone Reducatase |
| P-SETit.Ifr-1:1:3 | 61 | Isoflavone Reducatase |
| P-SETit.LaDo-1:1:2 | 62 | leucoanthocianidin dioxygenase |
| P-SETit.Mt1-1:1:2 | 63 | Metallothionein-like protein 1 |
| P-SETit.Nrt2-1:1:2 | 64 | Nitrate transporter-like protein |
| P-SETit.Nrt2-1:1:3 | 65 | Nitrate transporter-like protein |
| P-SETit.OMT2.1-1:1:2 | 66 | O-methyltransferase-2.1 |
| P-SETit.OMT2.2-1:1:2 | 67 | O-methyltransferase-2.2 |
| P-SETit.OMT2.3-1:1:1 | 68 | O-methyltransferase-2.3 |
| P-SETit.Omt3-1:1:3 | 69 | O-methyltransferase-3 |
| P-SETit.Omt4_2-1:1:2 | 70 | O-methyltransferase-4.2 |
| P-SETit.Pip2-1:1:3 | 71 | Aquaporin |
| P-SETit.Pip2-3-1:1:1 | 72 | Aquaporin |
| P-SETit.Pox-1:1:1 | 73 | Peroxidase 1 |
| P-SETit.Ppc-1:1:3 | 74 | Phosphoenolpyruvate carboxylase |
| P-SETit.Ppc-1:1:4 | 75 | Phosphoenolpyruvate carboxylase |
| P-SETit.Ppdk-1:1:1 | 76 | Pyruvate orthophosphate dikinase |
| P-SETit.Pro1-1:1:2 | 77 | Prolamin |
| P-SETit.Pro2-1:1:3 | 78 | Prolamin |
| P-SETit.Prx-1:1:1 | 79 | Peroxidase |
| P-SETit.Prx17-1:1:2 | 80 | Peroxidase-17 |
| P-SETit.Prx2-1:1:3 | 81 | Peroxidase-2 |
| P-SETit.Prx3-1:1:3 | 82 | Peroxidase-3 |
| P-SETit.Prx3-1:1:4 | 83 | Peroxidase-3 |
| P-SETit.Prx47-1:1:2 | 84 | Peroxidase-47 |
| P-SETit.Prx72-1:1:2 | 85 | Peroxidase-72 |
| P-SETit.PSI-4a-1:1:1 | 86 | Photosystem 1 4a |
| P-SETit.Rbcs-1:1:1 | 87 | Small subunit RUBISCO |
| P-SETit.Rcc3-1:1:1 | 88 | Lipid Transfer Protein-RCc3 |
| P-SETit.Rcc3-1:1:10 | 89 | Lipid Transfer Protein-RCc3 |
| P-SETit.Rcc3-1:1:11 | 90 | Lipid Transfer Protein-RCc3 |
| P-SETit.Rcc3-1:1:16 | 91 | Lipid Transfer Protein-RCc3 |
| P-SETit.Srp-1:1:2 | 92 | Stress responsive protein |
| P-SETit.Ssp1-1:1:1 | 93 | Seed storage protein |
| P-SETit.Ssp1-1:1:2 | 94 | Seed storage protein |
| P-SETit.Tga6-1:1:2 | 95 | Teosinte glume architecture |
| P-SETit.Tip-1:1:1 | 96 | Tonoplast intrinsic protein |
| P-SETit.Tip-1:1:4 | 97 | Tonoplast intrinsic protein |
| P-SETit.TubA2-1-1:1:2 | 98 | Tubulin A2-1 |
| P-SETit.TubA2-1-1:1:3 | 99 | Tubulin A2-1 |
| P-SETit.TubA2-2-1:1:3 | 100 | Tubulin A2-2 |
| P-SETit.TubA3-1:1:3 | 101 | Tubulin A3 |
| P-SETit.Ubq1-1:1:1 | 102 | Ubiquitin 1 |
| P-SETit.Ubq1-1:1:3 | 103 | Ubiquitin 1 |
| P-SETit.Ubq5-1:1:2 | 104 | Ubiquitin 5 |
| P-SETit.Ucc1-1:1:2 | 105 | Uclacyanin |
| L-SETit.Act8-1:1:2 | 106 | Actin 8 |
| L-SETit.Act8-1:1:3 | 107 | Actin 8 |
| L-SETit.Act8-1:1:4 | 108 | Actin 8-1 |
| L-SETit.Aip-1:1:1 | 109 | Auxin-induced protein |
| L-SETit.Alc1-1:1:1 | 110 | Alpha-coixin |
| L-SETit.Alc2-1:1:1 | 111 | Alpha-coixin |
| L-SETit.Ali1-1:1:1 | 112 | Aluminum-induced protein |
| L-SETit.Cab1-1:1:1 | 113 | Chlorophyll a/b binding protein-1 |
| L-SETit.Cab3-1:1:1 | 114 | Chlorophyll a/b binding protein-3 |
| L-SETit.Cbl7-1:1:1 | 115 | Calcineurin B-like protein |
| L-SETit.Ccoamt-1:1:2 | 116 | Cafeoyl CoA methyltransferase |
| L-SETit.Cda-1:1:1 | 117 | Cell death associated protein |
| L-SETit.CLUS1164825-1-1:1:1 | 118 | Cluster 1164825-1 |
| L-SETit.CLUS120796-1-1:1:1 | 119 | Cluster 120796-1 |
| L-SETit.CLUS120796-1-1:1:2 | 120 | Cluster 120796-1 |
| L-SETit.CLUS19108-1:1:1 | 121 | Cluster 19108 |
| L-SETit.CLUS19108-1:1:2 | 122 | Cluster 19108 |
| L-SETit.CLUS882664-1-1:1:1 | 123 | Cluster 882664-1 |
| L-SETit.CP29-1:1:1 | 124 | Chloroplast protein-29 |
| L-SETit.Cyp-1-1:1:1 | 125 | Cysteine protease-1 |
| L-SETit.Cyp78a-1:1:1 | 126 | Cysteine protease-78a |
| L-SETit.Cys-1:1:1 | 127 | Cysteine synthase |
| L-SETit.Dzs-1:1:1 | 128 | Delta zein storage protein |
| L-SETit.Eie-1:1:1 | 129 | Elongation Factor |
| L-SETit.EST CLUS675389-2- | 130 | Cluster 675389-2 |
| 1:1:1 | | |
| L-SETit.Fba-1:1:1 | 131 | Fructose-bisphosphate aldolase |
| L-SETit.Fst-1:1:1 | 132 | Flavonol 4-sulfotransferase |
| L-SETit.Gapdh2-1:1:1 | 133 | Glyceraldehyde-3-phosphate |
| | | dehydrogenase |
| L-SETit.Grcw2-1:1:1 | 134 | Glycine-rich cell wall |
| | | structural protein 2 |
| L-SETit.Gst-1:1:1 | 135 | Glutathione S-transferase |
| L-SETit.Ifr-1:1:1 | 136 | Isoflavone Reducatase |
| L-SETit.LaDo-1:1:1 | 137 | leucoanthocianidin dioxygenase |
| L-SETit.Mt1-1:1:1 | 138 | Metallothionein-like protein 1 |
| L-SETit.Nrt2-1:1:2 | 139 | Nitrate transporter-like protein |
| L-SETit.OMT2.1-1:1:1 | 140 | O-methyltransferase-2.1 |
| L-SETit.OMT2.2-1:1:1 | 141 | O-methyltransferase-2.2 |
| L-SETit.OMT2.2-1:1:2 | 142 | O-methyltransferase-2.3 |
| L-SETit.Omt3-1:1:1 | 143 | O-methyltransferase-3 |
| L-SETit.Omt4_2-1:1:1 | 144 | O-methyltransferase-4.2 |
| L-SETit.Pip2-1:1:1 | 145 | Aquaporin |
| L-SETit.Pip2-3-1:1:1 | 146 | Aquaporin |
| L-SETit.Pox-1:1:1 | 147 | Peroxidase 1 |
| L-SETit.Ppc-1:1:1 | 148 | Phosphoenolpyruvate carboxylase |
| L-SETit.Ppdk-1:1:2 | 149 | Pyruvate orthophosphate dikinase |
| L-SETit.Ppdk-1:1:4 | 150 | Pyruvate orthophosphate dikinase |
| L-SETit.Pro1-1:1:1 | 151 | Prolamin |
| L-SETit.Pro2-1:1:2 | 152 | Prolamin |
| L-SETit.Prx-1:1:1 | 153 | Peroxidase |
| L-SETit.Prx17-1:1:1 | 154 | Peroxidase-17 |
| L-SETit.Prx2-1:1:2 | 155 | Peroxidase-2 |
| L-SETit.Prx3-1:1:1 | 156 | Peroxidase-3 |
| L-SETit.Prx47-1:1:1 | 157 | Peroxidase-47 |
| L-SETit.Prx72-1:1:1 | 158 | Peroxidase-72 |
| L-SETit.PSI-4a-1:1:1 | 159 | Photosystem 1 4a |
| L-SETit.Rbcs-1:1:1 | 160 | Small subunit RUBISCO |
| L-SETit.Rcc3-1:1:1 | 161 | Lipid Transfer Protein-RCc3 |
| L-SETit.Rcc3-1:1:2 | 162 | Lipid Transfer Protein-RCc3 |
| L-SETit.Srp-1:1:1 | 163 | Stress responsive protein |
| L-SETit.Ssp1-1:1:1 | 164 | Seed storage protein |
| L-SETit.Tip-1:1:1 | 165 | Tonoplast intrinsic protein |
| L-SETit.TubA2-1-1:1:1 | 166 | Tubulin A2-1 |
| L-SETit.TubA2-2-1:1:1 | 167 | Tubulin A2-2 |
| L-SETit.TubA3-1:1:1 | 168 | Tubulin A3 |
| L-SETit.Ubq1-1:1:1 | 169 | Ubiquitin 1 |
| L-SETit.Ubq5-1:1:1 | 170 | Ubiquitin 5 |
| L-SETit.Ucc1-1:1:1 | 171 | Uclacyanin |
| I-SETit.Act8-1:1:2 | 172 | Actin 8 |
| I-SETit.CLUS120796-1-1:1:1 | 173 | Cluster 120796-1 |
| I-SETit.CLUS19108-1:1:1 | 174 | Cluster 19108 |
| I-SETit.Ppdk-1:1:1 | 175 | Pyruvate orthophosphate dikinase |
| I-SETit.TubA2_1-1:1:2 | 176 | Tubulin A2-1 |
| I-SETit.Ubq1-1:1:1 | 177 | Ubiquitin 1 |
| I-SETit.Ubq5-1:1:2 | 178 | Ubiquitin 5 |
| I-SETit.14-3-3A-2-1:1:1 | 179 | 14-3-3-like protein A |
| I-SETit.14-3-3A-3-1:1:2 | 180 | 14-3-3-like protein A |
| I-SETit.14-3-3A-4-1:1:2 | 181 | 14-3-3-like protein A |
| I-SETit.14-3-3A-5-1:1:2 | 182 | 14-3-3-like protein A |
| I-SETit.14-3-3B-2-1:1:1 | 183 | 14-3-3-like protein B |
| I-SETit.14-3-3B-3-1:1:2 | 184 | 14-3-3-like protein B |
| I-SETit.14-3-3B-4-1:1:2 | 185 | 14-3-3-like protein B |
| I-SETit.14-3-3B-5-1:1:2 | 186 | 14-3-3-like protein B |
| I-SETit.14-3-3C-1-1:1:1 | 187 | 14-3-3-like protein C |
| I-SETit.14-3-3C-2-1:1:1 | 188 | 14-3-3-like protein C |
| I-SETit.14-3-3C-3-1:1:2 | 189 | 14-3-3-like protein C |
| I-SETit.14-3-3C-4-1:1:2 | 190 | 14-3-3-like protein C |
| I-SETit.14-3-3C-5-1:1:2 | 191 | 14-3-3-like protein C |
| I-SETit.14-3-3D-1-1:1:2 | 192 | 14-3-3-like protein D |
| I-SETit.14-3-3D-2-1:1:1 | 193 | 14-3-3-like protein D |
| I-SETit.14-3-3D-3-1:1:2 | 194 | 14-3-3-like protein D |
| I-SETit.14-3-3D-4-1:1:3 | 195 | 14-3-3-like protein D |
| I-SETit.14-3-3D-5-1:1:2 | 196 | 14-3-3-like protein D |
| I-SETit.14-3-3E-2-1:1:1 | 197 | 14-3-3-like protein E |
| I-SETit.14-3-3E-3-1:1:2 | 198 | 14-3-3-like protein E |
| I-SETit.14-3-3E-4-1:1:2 | 199 | 14-3-3-like protein E |
| I-SETit.14-3-3E-5-1:1:2 | 200 | 14-3-3-like protein E |
| I-SETit.40S-7S-1_1-1:1:2 | 201 | 40S ribosomal protein S7 |
| I-SETit.40S-7S-1_2-1:1:2 | 202 | 40S ribosomal protein S7 |
| I-SETit.40S-7S-1_3-1:1:2 | 203 | 40S ribosomal protein S7 |
| I-SETit.40S-7S-1_4-1:1:2 | 204 | 40S ribosomal protein S7 |
| I-SETit.40S-7S-2_2-1:1:1 | 205 | 40S ribosomal protein S7 |
| I-SETit.40S-7S-2_3-1:1:1 | 206 | 40S ribosomal protein S7 |
| I-SETit.40S-7S-2_4-1:1:1 | 207 | 40S ribosomal protein S7 |
| I-SETit.40S-7S-3_1-1:1:2 | 208 | 40S ribosomal protein S7 |
| I-SETit.40S-7S-3_2-1:1:2 | 209 | 40S ribosomal protein S7 |
| I-SETit.40S-7S-3_3-1:1:2 | 210 | 40S ribosomal protein S7 |
| I-SETit.60S_L10A1-1-1:1:2 | 211 | 60S ribosomal protein L10A1 |
| I-SETit.60S_L10A1-2-1:1:2 | 212 | 60S ribosomal protein L10A1 |
| I-SETit.60S_L10A1-3-1:1:2 | 213 | 60S ribosomal protein L10A1 |
| I-SETit.60S_L10A1-4-1:1:1 | 214 | 60S ribosomal protein L10A1 |
| I-SETit.60S_L10A1-5-1:1:2 | 215 | 60S ribosomal protein L10A1 |
| I-SETit.ASA2-3-1:1:2 | 216 | Anthranilate Synthase alpha 2 |
| | | subunit |
| I-SETit.ClpD-1-1:1:1 | 217 | ATP-dependent Clp protease |
| | | ATP-binding subunit |
| I-SETit.DnaJ_1-1:1:2 | 218 | Heat shock protein |
| I-SETit.DnaJ3-2-1:1:2 | 219 | Heat shock protein |
| I-SETit.eEF1g_1-1:1:2 | 220 | Elongation Factor 1 gamma |
| I-SETit.eEF1g_4-1:1:3 | 221 | Elongation Factor 1 gamma |
| I-SETit.eIF5A1-1-1:1:1 | 222 | Elongation Factor 5 alpha |
| I-SETit.eIF5A1-2-1:1:2 | 223 | Elongation Factor 5 alpha |
| I-SETit.eIF5A1-3-1:1:2 | 224 | Elongation Factor 5 alpha |
| I-SETit.eIF5A1-4-1:1:2 | 225 | Elongation Factor 5 alpha |
| I-SETit.eIF5A1-5-1:1:2 | 226 | Elongation Factor 5 alpha |
| I-SETit.eIF5A2-1-1:1:2 | 227 | Elongation Factor 5 alpha |
| I-SETit.eIF5A2-2-1:1:3 | 228 | Elongation Factor 5 alpha |
| I-SETit.eIF5A2-3-1:1:2 | 229 | Elongation Factor 5 alpha |
| I-SETit.eIF5A2-4-1:1:2 | 230 | Elongation Factor 5 alpha |
| I-SETit.eIF5A2-5-1:1:2 | 231 | Elongation Factor 5 alpha |
| I-SETit.eIF5A3-1-1:1:1 | 232 | Elongation Factor 5 alpha |
| I-SETit.eIF5A3-2-1:1:2 | 233 | Elongation Factor 5 alpha |
| I-SETit.eIF5A3-3-1:1:2 | 234 | Elongation Factor 5 alpha |
| I-SETit.eIF5A3-4-1:1:2 | 235 | Elongation Factor 5 alpha |
| I-SETit.eIF5A3-5-1:1:2 | 236 | Elongation Factor 5 alpha |
| I-SETit.GAD_1-1:1:2 | 237 | UDP-glucuronic acid |
| | | decarboxylase |
| I-SETit.GAD_2-1:1:2 | 238 | UDP-glucuronic acid |
| | | decarboxylase |
| I-SETit.GAD_3-1:1:2 | 239 | UDP-glucuronic acid |
| | | decarboxylase |
| I-SETit.GAD_4-1:1:2 | 240 | UDP-glucuronic acid |
| | | decarboxylase |
| I-SETit.Grf1-3-1:1:1 | 241 | Putative growth-regulating |
| | | factor |
| I-SETit.GRP-1-1:1:1 | 242 | Glycine-rich RNA binding |
| | | protein |
| I-SETit.LSm8-1-1:1:2 | 243 | U6 snRNA-associated Sm-like |
| | | protein LSm8 |
| I-SETit.LSm8-2-1:1:1 | 244 | U6 snRNA-associated Sm-like |
| | | protein LSm8 |
| I-SETit.LSm8-3-1:1:1 | 245 | U6 snRNA-associated Sm-like |
| | | protein LSm8 |
| I-SETit.LSm8-4-1:1:2 | 246 | U6 snRNA-associated Sm-like |
| | | protein LSm8 |
| I-SETit.PGK3_1-1:1:2 | 247 | Phosphoglycerate kinase |
| I-SETit.PGK3_2-1:1:1 | 248 | Phosphoglycerate kinase |
| I-SETit.PIP1_1_2-1:1:1 | 249 | Aguaporin |
| I-SETit.PIP1-1_1-1:1:1 | 250 | Aguaporin |
| I-SETit.PIP1-1_3-1:1:2 | 251 | Aguaporin |
| I-SETit.PIP1-4_3-1:1:2 | 252 | Aguaporin |
| I-SETit.PIP2-2_2-1:1:2 | 253 | Aguaporin |
| I-SETit.PIP2-2_3-1:1:2 | 254 | Aguaporin |
| I-SETit.PIP2-5_2-1:1:2 | 255 | Aguaporin |
| I-SETit.PIP2-5_3-1:1:2 | 256 | Aguaporin |
| I-SETit.Prx17-2-1:1:1 | 257 | Peroxidase 17 |
| I-SETit.Prx3-1-1:1:2 | 258 | Peroxidase 3 |
| I-SETit.SBD-1-1:1:2 | 259 | Shwachman-Bodian-Diamond |
| | | syndrome protein |
| I-SETit.SBD-2-1:1:1 | 260 | Shwachman-Bodian-Diamond |
| | | syndrome protein |
| I-SETit.SBD-3-1:1:2 | 261 | Shwachman-Bodian-Diamond |
| | | syndrome protein |
| I-SETit.TubA2_1-1:1:1 | 262 | Tubulin A2 |
| I-SETit.TubA2_2-1:1:1 | 263 | Tubulin A2 |
| I-SETit.TubA2_3-1:1:1 | 264 | Tubulin A2 |
| I-SETit.TubA3_1-1:1:1 | 265 | Tubulin A3 |
| I-SETit.TubA3_2-1:1:1 | 266 | Tubulin A3 |
| I-SETit.Wx1-1-1:1:2 | 267 | Putative granule bound starch |
| | | synthase |
| T-SETit.Act1-1:1:1 | 268 | Actin 1 |
| T-SETit.Act8-1:1:1 | 269 | Actin 8 |
| T-SETit.Ams1-1:1:1 | 270 | S-adenosylmethionine |
| | | synthetase 1 |
| T-SETit.Ctpt-1:1:2 | 271 | Triose phosphate/phosphate |
| | | translocator, chloroplast |
| | | precursor |
| T-SETit.Fba-1:1:1 | 272 | Fructose-bisphosphate aldolase |
| T-SETit.Fnr-1:1:1 | 273 | Ferredoxin-NADP+ reductase |
| T-SETit.Mes2-1:1:1 | 274 | Methionine synthase 2 |
| T-SETit.Ntr-1:1:1 | 275 | Nitrite transporter |
| T-SETit.Sus2-1:1:1 | 276 | Sucrose synthase 2 |
| GOI-TS-APX | 277 | Ascorbate Peroxidase |
| GOI-TS-APX:1:2 | 278 | Ascorbate Peroxidase |
| GOI-TS-APX2:1:1 | 279 | Ascorbate Peroxidase |
| GOI-TS-CNT:1:2 | 280 | 2-C-methyl-D-erythritol 4- |
| | | phosphate cytidylyltransferase |
| GOI-TS-DHDPS:1:2 | 281 | Dihydrodipicolinate synthase |
| | | precursor, chloroplastic |
| GOI-TS-Fe-SD:1:1 | 282 | Iron-superoxidedismutases, |
| | | chloroplastic |
| GOI-TS-PPR:1:1 | 283 | Pentatricopeptide repeat- |
| | | containing protein, putative |
| TS-SETit.APG6-1:1:1 | 284 | Casein lytic proteinase B3 heat |
| | | shock protein-like |
| TS-SETit.APX.2.ex1-1:1:1 | 285 | Ascorbate Peroxidase |
| TS-SETit.APX.ex1-1:1:1 | 286 | Ascorbate Peroxidase |
| TS-SETit.APX.ex2-1:1:2 | 287 | Ascorbate Peroxidase |
| TS-SETit.APX2.ex2-1:1:1 | 288 | Ascorbate Peroxidase |
| TS-SETit.APX3-1:1:1 | 289 | Ascorbate Peroxidase |
| TS-SETit.ASA2-1:1:1 | 290 | Anthranilate Synthase alpha 2 |
| | | subunit |
| TS-SETit.CC10-1:1:1 | 291 | Chloroplast Chaperonin 10 Kd |
| | | subunit |
| TS-SETit.CHOR1-1:1:1 | 292 | Calcium homeostasis regulator |
| TS-SETit.ClpD-1:1:1 | 293 | ATP-dependent Clp protease |
| | | ATP-binding subunit |
| TS-SETit.CNT.ex1-1:1:1 | 294 | 2-C-methyl-D-erythritol 4- |
| | | phosphate cytidylyltransferase |
| TS-SETit.CNT.ex2-1:1:2 | 295 | 2-C-methyl-D-erythritol 4- |
| | | phosphate cytidylyltransferase |
| TS-SETit.CR88-1:1:1 | 296 | Heat-shock protein putative |
| TS-SETit.DHDPS.Ex1-1:1:1 | 297 | Dihydrodipicolinate synthase |
| | | precursor, chloroplastic |
| TS-SETit.DHDPS.Ex2-1:1:1 | 298 | Dihydrodipicolinate synthase |
| | | precursor, chloroplastic |
| TS-SETit.Fe-SD.ex1-1:1:1 | 299 | Iron-superoxidedismutases, |
| | | chloroplastic |
| TS-SETit.Fe-SD.ex2-1:1:1 | 300 | Iron-superoxidedismutases, |
| | | chloroplastic |
| TS-SETit.G-typA-1:1:1 | 301 | GTP-binding protein typA |
| TS-SETit.HDh-1:1:1 | 302 | Haloacid dehalogenase-like |
| | | hydrolase |
| TS-SETit.IMP-1:1:1 | 303 | Inositol-1-monophosphatase, |
| | | putative, chloroplastic |
| TS-SETit.MDH-1:1:1 | 304 | Putative NAD-malate |
| | | dehydrogenase |
| TS-SETit.PPR.ex1-1:1:1 | 305 | Pentatricopeptide repeat- |
| | | containing protein, putative |
| TS-SETit.PPR.ex2-1:1:2 | 306 | Pentatricopeptide repeat- |
| | | containing protein, putative |
| TS-SETit.PSPR-3-1:1:1 | 307 | Plastid-specific 30S ribosomal |
| | | protein 3 |
| TS-SETit.RbcS_1-1:1:1 | 308 | Small subunit RUBISCO |
| TS-SETit.RbcS_2-1:1:1 | 309 | Small subunit RUBISCO |
| TS-SETit.RbcS_3-1:1:1 | 310 | Small subunit RUBISCO |
| TS-SETit.RbcS_4-1:1:1 | 311 | Small subunit RUBISCO |
| TS-SETit.ShkG-1:1:1 | 312 | 5-enolpyruvylshikimate-3- |
| | | phosphate synthase precursor |
| TS-SETit.SRP43-1:1:1 | 313 | Signal recognition particle 43 |
| | | kDa protein, chloroplastic |
| TS-SETit.TDh-1:1:1 | 314 | Threonine dehydratase |
| | | biosynthetic, chloroplast |
| | | precursor |
| TS-SETit.ThR-1:1:1 | 315 | Thioredoxin |
| TS-SETit.Wx1-1:1:1 | 316 | Putative granule bound starch |
| | | synthase |
| I-SETit.APX.2-1:1:1 | 317 | Ascorbate Peroxidase |
| I-SETit.APX-1:1:1 | 318 | Ascorbate Peroxidase |
| I-SETit.APX-1:1:2 | 319 | Ascorbate Peroxidase |
| I-SETit.CNT.1-1:1:1 | 320 | 2-C-methyl-D-erythritol 4- |
| | | phosphate cytidylyltransferase |
| I-SETit.DHDPS_1-1:1:1 | 321 | Dihydrodipicolinate synthase |
| | | precursor, chloroplastic |
| I-SETit.Fe-SD-1:1:1 | 322 | Iron-superoxidedismutases, |
| | | chloroplastic |
| I-SETit.PPR-1:1:2 | 323 | Pentatricopeptide repeat- |
| | | containing protein, putative |
| TS-SETit.APG6.pep | 324 | Casein lytic proteinase B3 heat |
| | | shock protein-like |
| TS-SETit.APX.2.pep | 325 | Ascorbate Peroxidase |
| TS-SETit.APX.pep | 326 | Ascorbate Peroxidase |
| TS-SETit.APX3.pep | 327 | Ascorbate Peroxidase |
| TS-SETit.ASA2.pep | 328 | Anthranilate Synthase alpha 2 |
| | | subunit |
| TS-SETit.CC10.pep | 329 | Chloroplast Chaperonin 10 Kd |
| | | subunit |
| TS-SETit.CHoR1.pep | 330 | Calcium homeostasis regulator |
| TS-SETit.ClpD.pep | 331 | ATP-dependent Clp protease |
| | | ATP-binding subunit |
| TS-SETit.CNT.pep | 332 | 2-C-methyl-D-erythritol 4- |
| | | phosphate cytidylyltransferase |
| TS-SETit.CR88.pep | 333 | Heat-shock protein putative |
| TS-SETit.DHDPS.pep | 334 | Dihydrodipicolinate synthase |
| | | precursor, chloroplastic |
| TS-SETit.Fe-SD.pep | 335 | Iron-superoxidedismutases, |
| | | chloroplastic |
| TS-SETit.G-typA.pep | 336 | GTP-binding protein typA |
| TS-SETit.HDh.pep | 337 | Haloacid dehalogenase-like |
| | | hydrolase |
| TS-SETit.IMP.pep | 338 | Inositol-1-monophosphatase, |
| | | putative, chloroplastic |
| TS-SETit.MDH.pep | 339 | Putative NAD-malate |
| | | dehydrogenase |
| TS-SETit.PPR.pep | 340 | Pentatricopeptide repeat- |
| | | containing protein, putative |
| TS-SETit.PSPR-3.pep | 341 | Plastid-specific 30S ribosomal |
| | | protein 3 |
| TS-SETit.RbcS_1.pep | 342 | Small subunit RUBISCO |
| TS-SETit.RbcS_2.pep | 343 | Small subunit RUBISCO |
| TS-SETit.RbcS_3.pep | 344 | Small subunit RUBISCO |
| TS-SETit.RbcS_4.pep | 345 | Small subunit RUBISCO |
| TS-SETit.ShkG.pep | 346 | 5-enolpyruvylshikimate-3- |
| | | phosphate synthase precursor |
| TS-SETit.SRP43.pep | 347 | Signal recognition particle 43 |
| | | kDa protein, chloroplastic |
| TS-SETit.TDh.pep | 348 | Threonine dehydratase bio- |
| | | synthetic, chloroplast precursor |
| TS-SETit.ThR.pep | 349 | Thioredoxin |
| TS-SETit.Wx1.pep | 350 | Putative granule bound starch |
| | | synthase |
| E-FMV.35S-1:1:2 | 351 | FMV 35S enhancer |
| E-SETit.Mth-1:1:2 | 352 | Metallothionein |
| P-SETit.25509-1:1:1 | 353 | Cluster 25509 |
| P-SETit.25509-1:1:2 | 354 | Cluster 25509 |
| P-SETit.Act8-1:1:1 | 355 | Actin 8 |
| P-SETit.Act8-1:1:2 | 356 | Actin 8 |
| P-SETit.Act8-1:1:3 | 357 | Actin 8 |
| P-SETit.Act8-1:1:4 | 358 | Actin 8 |
| P-SETit.Act8-1:1:7 | 359 | Actin 8 |
| P-SETit.Act8-1-1:1:1 | 360 | Actin 8 |
| P-SETit.Aip-1:1:2 | 361 | Auxin-induced protein |
| P-SETit.AKR-1:1:1 | 362 | Aspartate kinase reductase |
| P-SETit.AKR-1:1:2 | 363 | Aspartate kinase reductase |
| P-SETit.Alc2-1:1:1 | 364 | Alpha-coixin |
| P-SETit.Ali1-1:1:1 | 365 | Aluminum-induced protein |
| P-SETit.Ali1-1:1:2 | 366 | Aluminum-induced protein |
| P-SETit.Ali1-1:1:4 | 367 | Aluminum-induced protein |
| P-SETit.Cab3-1:1:1 | 368 | Chlorophyll a/b binding protein 3 |
| P-SETit.Cab3-1:1:2 | 369 | Chlorophyll a/b binding protein 3 |
| P-SETit.cab6-1:1:1 | 370 | Chlorophyll a/b binding protein 6 |
| P-SETit.Cab6-1:1:1 | 371 | Chlorophyll a/b binding protein 6 |
| P-SETit.Cab6-1:1:2 | 372 | Chlorophyll a/b binding protein 6 |
| P-SETit.Cafeoyl CoA | 373 | Cafeoyl CoA methyltransferase |
| methyltransferase-1:1:1 | | |
| P-SETit.Caffeoyl-CoA O- | 374 | Cafeoyl CoA methyltransferase |
| methyltrasnferase-1:1:1 | | |
| P-SETit.Caffeoyl-CoA O- | 375 | Cafeoyl CoA methyltransferase |
| methyltrasnferase-a-1:1:1 | | |
| P-SETit.Ccoamt-1:1:1 | 376 | Cafeoyl CoA methyltransferase |
| P-SETit.Chi-1:1:1 | 377 | Chitinase |
| P-SETit.chitinase-1:1:1 | 378 | Chitinase |
| P-SETit.Chitinase-1:1:1 | 379 | Chitinase |
| P-SETit.Chitinase-1:1:2 | 380 | Chitinase |
| P-SETit.Chitinase-1:1:3 | 381 | Chitinase |
| P-SETit.Chl A/b III-1:1:1 | 382 | Chlorophyll a/b binding protein 3 |
| P-SETit.Chl a/b pre-1:1:1 | 383 | Chlorophyll a/b binding pre- |
| | | protein |
| P-SETit.Class III citinase-1:1:1 | 384 | Class III citinase |
| P-SETit.Class III citinase-1:1:2 | 385 | Class III citinase |
| P-SETit.Class III citinase-1:1:3 | 386 | Class III citinase |
| P-SETit.CLUS19108-1:1:1 | 387 | Cluster 19108 |
| P-SETit.CLUS882664-1-1:1:1 | 388 | Cluster 882664 |
| P-SETit.CLUS882664-1-1:1:2 | 389 | Cluster 882664 |
| P-SETit.Cp26-1:1:1 | 390 | Chloroplast protein-26 |
| P-SETit.Cp26-1:1:2 | 391 | Chloroplast protein-26 |
| P-SETit.CP29-1:1:1 | 392 | Chloroplast protein-29 |
| P-SETit.CP29-1:1:2 | 393 | Chloroplast protein-29 |
| P-SETit.CP29-1:1:3 | 394 | Chloroplast protein-29 |
| P-SETit.CP29-1:1:5 | 395 | Chloroplast protein-29 |
| P-SETit.Cyp78a-1:1:1 | 396 | Cysteine protease-78a |
| P-SETit.Cys-1:1:1 | 397 | Cystein protease |
| P-SETit.Cys-1:1:4 | 398 | Cystein protease |
| P-SETit.Cys-1:1:5 | 399 | Cystein protease |
| P-SETit.DRP-1:1:1 | 400 | Dehydration responsive protein |
| P-SETit.DRP-1:1:2 | 401 | Dehydration responsive protein |
| P-SETit.DRP-B-1:1:1 | 402 | Dehydration responsive protein |
| P-SETit.Dzs-1:1:1 | 403 | Delta zein storage protein |
| P-SETit.Dzs-1:1:2 | 404 | Delta zein storage protein |
| P-SETit.Dzs-1:1:3 | 405 | Delta zein storage protein |
| P-SETit.ESTCLUS675389-2- | 406 | Cluster 675389-2 |
| 1:1:1 | | |
| P-SETit.ESTCLUS675389-2- | 407 | Cluster 675389-2 |
| 1:1:2 | | |
| P-SETit.FBP-ald-1:1:1 | 408 | Fructose 1,6-Bisphosphate |
| | | Aldolase |
| P-SETit.FM54-1:1:1 | 409 | Cluster 1102871_1 |
| P-SETit.FM63-1:1:1 | 410 | Cluster 1019870_1 |
| P-SETit.foxtailRcc3-1:1:1 | 411 | Lipid Transfer Protein-RCc3 |
| P-SETit.FStr1-1:1:1 | 412 | Flavonol 4-sulfotransferase |
| P-SETit.FStr1-1:1:2 | 413 | Flavonol 4-sulfotransferase |
| P-SETit.FStr2-1:1:1 | 414 | Flavonol 4-sulfotransferase |
| P-SETit.Gahdp-1:1:1 | 415 | Glyceraldehyde-3-phosphate |
| | | dehydrogenase |
| P-SETit.Gahdp-1:1:2 | 416 | Glyceraldehyde-3-phosphate |
| | | dehydrogenase |
| P-SETit.gapdh-1:1:1 | 417 | Glyceraldehyde-3-phosphate |
| | | dehydrogenase |
| P-SETit.Gapdh2-1:1:1 | 418 | Glyceraldehyde-3-phosphate |
| | | dehydrogenase |
| P-SETit.Gapdh2-1:1:2 | 419 | Glyceraldehyde-3-phosphate |
| | | dehydrogenase |
| P-SETit.Glutathione S- | 420 | Glutathione S-Transferase |
| Transferase-1:1:1 | | |
| P-SETit.Glutathione S- | 421 | Glutathione S-Transferase |
| transferase-1:1:1 | | |
| P-SETit.Glutathione S- | 422 | Glutathione S-Transferase |
| transferase-1:1:2 | | |
| P-SETit.GlutathioneS- | 423 | Glutathione S-Transferase |
| transferase-1:1:3 | | |
| P-SETit.Grcw2-1:1:2 | 424 | Glycine-rich cell wall structural |
| | | protein 2 |
| P-SETit.Grf-1:1:1 | 425 | Putative growth-regulating factor |
| P-SETit.Ifr-1:1:1 | 426 | Isoflavone Reducatase |
| P-SETit.Ifr2-1:1:1 | 427 | Isoflavone Reducatase |
| P-SETit.Isoflavone Red Like- | 428 | Isoflavone Reductase like |
| 1:1:1 | | |
| P-SETit.Isoflavone Reducatase | 429 | Isoflavone Reductase like |
| like-1:1:2 | | |
| P-SETit.Isoflavone Reductase | 430 | Isoflavone Reductase |
| 2-1:1:1 | | |
| P-SETit.Isoflavone Reductase | 431 | Isoflavone Reductase like |
| Like-1:1:1 | | |
| P-SETit.Isoflavone Reductase- | 432 | Isoflavone Reductase |
| 1:1:1 | | |
| P-SETit.Isoflavone reductase- | 433 | Isoflavone Reductase |
| 1:1:1 | | |
| P-SETit.Isoflavone reductase- | 434 | Isoflavone Reductase |
| 1:1:2 | | |
| P-SETit.IsoflavoneReductase1- | 435 | Isoflavone Reductase |
| 1:1:1 | | |
| P-SETit.IsoflavoneReductase1- | 436 | Isoflavone Reductase |
| 1:1:2 | | |
| P-SETit.LaDo-1:1:1 | 437 | leucoanthocianidin dioxygenase |
| P-SETit.Mt1-1:1:1 | 438 | Metallothionein-like protein 1 |
| P-SETit.Mt1-1:1:3 | 439 | Metallothionein-like protein 1 |
| P-SETit.Mth-1:1:1 | 440 | Metallothionein |
| P-SETit.Mth-1:1:2 | 441 | Metallothionein |
| P-SETit.Mth-1:1:4 | 442 | Metallothionein |
| P-SETit.MTLP-1:1:1 | 443 | Metallothionein-like protein |
| P-SETit.MTLP-1:1:2 | 444 | Metallothionein-like protein |
| P-SETit.MTLP-1:1:3 | 445 | Metallothionein-like protein |
| P-SETit.Nadp-Me-1:1:1 | 446 | NADP malate enzyme |
| P-SETit.Nadp-me-1:1:1 | 447 | NADP malate enzyme |
| P-SETit.Nitrite Transporter- | 448 | Nitrite transporter |
| 1:1:1 | | |
| P-SETit.Nitrite transporter- | 449 | Nitrite transporter |
| 1:1:1 | | |
| P-SETit.Nitrite Transporter- | 450 | Nitrite transporter |
| 1:1:2 | | |
| P-SETit.Nitrite transporter- | 451 | Nitrite transporter |
| 1:1:2 | | |
| P-SETit.Nitrite Transporter- | 452 | Nitrite transporter |
| 1:1:3 | | |
| P-SETit.Nitritetransporter-1:1:3 | 453 | Nitrite transporter |
| P-SETit.Nr1-1:1:1 | 454 | Nitrate reductase |
| P-SETit.Nr1-1:1:2 | 455 | Nitrate reductase |
| P-SETit.Nr1-1:1:3 | 456 | Nitrate reductase |
| P-SETit.Nr1-1:1:4 | 457 | Nitrate reductase |
| P-SETit.Nr1-1:1:5 | 458 | Nitrate reductase |
| P-SETit.NRED-1:1:1 | 459 | Nitrate reductase |
| P-SETit.Nrt2-1:1:1 | 460 | Nitrate transporter-like protein |
| P-SETit.OMT2.1-1:1:1 | 461 | O-methyltransferase |
| P-SETit.OMT2.2-1:1:1 | 462 | O-methyltransferase |
| P-SETit.Omt3-1:1:1 | 463 | O-methyltransferase |
| P-SETit.Omt3-1:1:2 | 464 | O-methyltransferase |
| P-SETit.Omt4_2-1:1:1 | 465 | O-methyltransferase |
| P-SETit.OMt4-1:1:1 | 466 | O-methyltransferase |
| P-SETit.Peroxidase-1:1:1 | 467 | Peroxidase |
| P-SETit.Peroxidase-1:1:2 | 468 | Peroxidase |
| P-SETit.Pip2-1:1:1 | 469 | Aquaporin |
| P-SETit.pip2-1:1:1 | 470 | Aquaporin |
| P-SETit.Pip2-1:1:2 | 471 | Aquaporin |
| P-SETit.pip2-1:1:2 | 472 | Aquaporin |
| P-SETit.Pip2-3-1:1:2 | 473 | Aquaporin |
| P-SETit.Pip2-3-1:1:3 | 474 | Aquaporin |
| P-SETit.Pip2-3-1:1:4 | 475 | Aquaporin |
| P-SETit.PIP2-5-1:1:1 | 476 | Aquaporin |
| P-SETit.POX-1:1:1 | 477 | Peroxidase |
| P-SETit.Ppc-1:1:1 | 478 | Phosphoenolpyruvate carboxylase |
| P-SETit.Ppc-1:1:2 | 479 | Phosphoenolpyruvate carboxylase |
| P-SETit.Ppc-1:1:5 | 480 | Phosphoenolpyruvate carboxylase |
| P-SETit.Ppc-1:1:6 | 481 | Phosphoenolpyruvate carboxylase |
| P-SETit.Ppdk-1:1:2 | 482 | Pyruvate orthophosphate dikinase |
| P-SETit.Pro1-1:1:1 | 483 | Prolamine 1 |
| P-SETit.Pro2-1:1:1 | 484 | Prolamine 2 |
| P-SETit.Pro2-1:1:2 | 485 | Prolamine 2 |
| P-SETit.Prx17-1:1:1 | 486 | Peroxidase 17 |
| P-SETit.Prx2-1:1:1 | 487 | Peroxidase 2 |
| P-SETit.Prx2-1:1:2 | 488 | Peroxidase 2 |
| P-SETit.Prx2-1:1:4 | 489 | Peroxidase 2 |
| P-SETit.Prx3-1:1:1 | 490 | Peroxidase 3 |
| P-SETit.Prx3-1:1:2 | 491 | Peroxidase 3 |
| P-SETit.Prx3-1:1:5 | 492 | Peroxidase 3 |
| P-SETit.Prx4-1:1:1 | 493 | Peroxidase 4 |
| P-SETit.Prx47-1:1:1 | 494 | Peroxidase 47 |
| P-SETit.Prx47-1:1:3 | 495 | Peroxidase 47 |
| P-SETit.Prx72-1:1:1 | 496 | Peroxidase 72 |
| P-SETit.PSIRC-1:1:1 | 497 | Photosystem 1 reaction center |
| P-SETit.Rbcs-1:1:2 | 498 | Small subunit RUBISCO |
| P-SETit.Rcc3-1:1:12 | 499 | Lipid Transfer Protein-RCc3 |
| P-SETit.Rcc3-1:1:13 | 500 | Lipid Transfer Protein-RCc3 |
| P-SETit.Rcc3-1:1:14 | 501 | Lipid Transfer Protein-RCc3 |
| P-SETit.Rcc3-1:1:15 | 502 | Lipid Transfer Protein-RCc3 |
| P-SETit.Rcc3-1:1:2 | 503 | Lipid Transfer Protein-RCc3 |
| P-SETit.Rcc3-1:1:3 | 504 | Lipid Transfer Protein-RCc3 |
| P-SETit.Rcc3-1:1:4 | 505 | Lipid Transfer Protein-RCc3 |
| P-SETit.Rcc3-1:1:5 | 506 | Lipid Transfer Protein-RCc3 |
| P-SETit.Rcc3-1:1:6 | 507 | Lipid Transfer Protein-RCc3 |
| P-SETit.Rcc3-1:1:7 | 508 | Lipid Transfer Protein-RCc3 |
| P-SETit.Rcc3-1:1:8 | 509 | Lipid Transfer Protein-RCc3 |
| P-SETit.Rcc3-1:1:9 | 510 | Lipid Transfer Protein-RCc3 |
| P-SETit.RUBP-1:1:1 | 511 | RuBP-carboxylase/oxygenase |
| P-SETit.RUBP-pre-1:1:1 | 512 | RuBP-carboxylase/oxygenase |
| | | precursor |
| P-SETit.Srp-1:1:1 | 513 | Stress responsive protein |
| P-SETit.Srp-1:1:3 | 514 | Stress responsive protein |
| P-SETit.Tga6-1:1:1 | 515 | Teosinte glume architecture |
| P-SETit.TGA6-1:1:1 | 516 | Teosinte glume architecture |
| P-SETit.TGA6-1:1:2 | 517 | Teosinte glume architecture |
| P-SETit.TIP-1:1:1 | 518 | Tonoplast intrinsic protein |
| P-SETit.Tip-1:1:2 | 519 | Tonoplast intrinsic protein |
| P-SETit.Tip-1:1:3 | 520 | Tonoplast intrinsic protein |
| P-SETit.Tip-1:1:5 | 521 | Tonoplast intrinsic protein |
| P-SETit.Tip-1:1:6 | 522 | Tonoplast intrinsic protein |
| P-SETit.Tub3A-1:1:1 | 523 | Tubulin A3 |
| P-SETit.TubA-1:1:1 | 524 | Tubulin A |
| P-SETit.TubA-1:1:2 | 525 | Tubulin A |
| P-SETit.TubA2-1-1:1:1 | 526 | Tubulin A2 |
| P-SETit.TubA2-1-1:1:4 | 527 | Tubulin A2 |
| P-SETit.TubA2-2-1:1:1 | 528 | Tubulin A2 |
| P-SETit.TubA2-2-1:1:2 | 529 | Tubulin A2 |
| P-SETit.TubA3-1:1:1 | 530 | Tubulin A3 |
| P-SETit.TubA3-1:1:2 | 531 | Tubulin A3 |
| P-SETit.Ubq1-1:1:2 | 532 | Ubiquitin 1 |
| P-SETit.Ubq5-1:1:1 | 533 | Ubiquitin 5 |
| P-SETit.Ucc1-1:1:1 | 534 | Uclacyanin |
| P-SETit.Ucc1-1:1:3 | 535 | Uclacyanin |
| P-SETit.Ucc2-1:1:1 | 536 | Uclacyanin |
| L-SETit.25509-1:1:1 | 537 | Cluster 25509 |
| L-SETit.Act1-1:1:1 | 538 | Actin 1 |
| L-SETit.Act2-1:1:1 | 539 | Actin 2 |
| L-SETit.Act8-1:1:1 | 540 | Actin 8 |
| L-SETit.Actin-1:1:1 | 541 | Actin |
| L-SETit.AKR-1:1:1 | 542 | Aspartate kinase reductase |
| L-SETit.Cab3-1:1:2 | 543 | Chlorophyll a/b |
| L-SETit.Caffeoyl-CoA O- | 544 | Caffeoyl-CoA O- |
| methyltrasnferase-1:1:1 | | methyltrasnferase |
| L-SETit.Caffeoyl-CoAO- | 545 | Caffeoyl-CoA O- |
| methyltrasnferase-1:1:2 | | methyltrasnferase |
| L-SETit.Ccoamt-1:1:1 | 546 | Caffeoyl-CoA O- |
| | | methyltrasnferase |
| L-SETit.Chi-1:1:1 | 547 | Chitinase |
| L-SETit.CP29-1:1:2 | 548 | Chloroplast protein-29 |
| L-SETit.CP29-1:1:3 | 549 | Chloroplast protein-29 |
| L-SETit.DRP-1:1:1 | 550 | Dehydration responsive protein |
| L-SETit.DRP-1:1:2 | 551 | Dehydration responsive protein |
| L-SETit.FStr1-1:1:1 | 552 | Flavonol 4-sulfotransferase |
| L-SETit.FStr1-1:1:2 | 553 | Flavonol 4-sulfotransferase |
| L-SETit.FStr1-1:1:3 | 554 | Flavonol 4-sulfotransferase |
| L-SETit.gapdh-1:1:1 | 555 | Glyceraldehyde-3-phosphate |
| | | dehydrogenase |
| L-SETit.Gapdh-1:1:1 | 556 | Glyceraldehyde-3-phosphate |
| | | dehydrogenase |
| L-SETit.Grf-1:1:1 | 557 | Putative growth-regulating factor |
| L-SETit.Grf-1:1:2 | 558 | Putative growth-regulating factor |
| L-SETit.Isoflavone | 559 | Isoflavone Reductase |
| Reductase2-1:1:1 | | |
| L-SETit.Isoflavone | 560 | Isoflavone Reductase |
| Reductase1-1:1:1 | | |
| L-SETit.MOt4-1:1:1 | 561 | O-methyltransferase |
| L-SETit.Mth-1:1:1 | 562 | Metallothionein |
| L-SETit.Mth-1:1:2 | 563 | Metallothionein |
| L-SETit.MTLP-1:1:1 | 564 | Metallothionein like protein |
| L-SETit.MTLP-1:1:2 | 565 | Metallothionein like protein |
| L-SETit.Nadp-me-1:1:1 | 566 | NADP malate enzyme |
| L-SETit.NADP-Me-1:1:1 | 567 | NADP malate enzyme |
| L-SETit.Nr1-1:1:1 | 568 | Nitrate reductase |
| L-SETit.Nr1-1:1:2 | 569 | Nitrate reductase |
| L-SETit.Nr1-1:1:3 | 570 | Nitrate reductase |
| L-SETit.Nrt2-1:1:1 | 571 | Nitrate reductase |
| L-SETit.OMt4-1:1:1 | 572 | O-methyltransferase |
| L-SETit.Pip2-3-1:1:2 | 573 | Aquaporin |
| L-SETit.POX-1:1:1 | 574 | Peroxidase |
| L-SETit.Ppc-1:1:2 | 575 | Phosphoenolpyruvate carboxylase |
| L-SETit.Ppc-1:1:3 | 576 | Phosphoenolpyruvate carboxylase |
| L-SETit.Ppc-1:1:4 | 577 | Phosphoenolpyruvate carboxylase |
| L-SETit.Ppdk-1:1:1 | 578 | Pyruvate orthophosphate dikinase |
| L-SETit.Ppdk-1:1:3 | 579 | Pyruvate orthophosphate dikinase |
| L-SETit.Pro2-1:1:1 | 580 | Prolamine 2 |
| L-SETit.Prx2-1:1:1 | 581 | Peroxidase 2 |
| L-SETit.Prx4-1:1:1 | 582 | Peroxidase 4 |
| L-SETit.Rcc3-1:1:3 | 583 | Lipid Transfer Protein-RCc3 |
| L-SETit.TGA6-1:1:1 | 584 | Teosinte glume architecture |
| L-SETit.TIP-1:1:1 | 585 | Tonoplast intrinsic protein |
| L-SETit.Tip-1:1:2 | 586 | Tonoplast intrinsic protein |
| L-SETit.TubA-1:1:1 | 587 | Tubulin A |
| L-SETit.TubA-1:1:2 | 588 | Tubulin A |
| I-SETit.14-3-3A-3-1:1:1 | 589 | 14-3-3-like protein A |
| I-SETit.14-3-3A-4-1:1:1 | 590 | 14-3-3-like protein A |
| I-SETit.14-3-3A-5-1:1:1 | 591 | 14-3-3-like protein A |
| I-SETit.14-3-3B-3-1:1:1 | 592 | 14-3-3-like protein B |
| I-SETit.14-3-3B-4-1:1:1 | 593 | 14-3-3-like protein B |
| I-SETit.14-3-3B-5-1:1:1 | 594 | 14-3-3-like protein B |
| I-SETit.14-3-3C-3-1:1:1 | 595 | 14-3-3-like protein C |
| I-SETit.14-3-3C-4-1:1:1 | 596 | 14-3-3-like protein C |
| I-SETit.14-3-3C-5-1:1:1 | 597 | 14-3-3-like protein C |
| I-SETit.14-3-3D-1-1:1:1 | 598 | 14-3-3-like protein D |
| I-SETit.14-3-3D-3-1:1:1 | 599 | 14-3-3-like protein D |
| I-SETit.14-3-3D-4-1:1:1 | 600 | 14-3-3-like protein D |
| I-SETit.14-3-3D-4-1:1:2 | 601 | 14-3-3-like protein D |
| I-SETit.14-3-3D-5-1:1:1 | 602 | 14-3-3-like protein D |
| I-SETit.14-3-3E-3-1:1:1 | 603 | 14-3-3-like protein E |
| I-SETit.14-3-3E-4-1:1:1 | 604 | 14-3-3-like protein E |
| I-SETit.14-3-3E-5-1:1:1 | 605 | 14-3-3-like protein E |
| I-SETit.14-3-31p-1:1:1 | 606 | 14-3-3-like protein |
| I-SETit.40S-7S-1_1-1:1:1 | 607 | 40S ribosomal protein S7 |
| I-SETit.40S-7S-1_2-1:1:1 | 608 | 40S ribosomal protein S7 |
| I-SETit.40S-7S-1_3-1:1:1 | 609 | 40S ribosomal protein S7 |
| I-SETit.40S-7S-1_4-1:1:1 | 610 | 40S ribosomal protein S7 |
| I-SETit.40S-7S-3_1-1:1:1 | 611 | 40S ribosomal protein S7 |
| I-SETit.40S-7S-3_2-1:1:1 | 612 | 40S ribosomal protein S7 |
| I-SETit.40S-7S-3_3-1:1:1 | 613 | 40S ribosomal protein S7 |
| I-SETit.40S-7S-3_3p-1:1:1 | 614 | 40S ribosomal protein S7 |
| I-SETit.60S_L10A1-1-1:1:1 | 615 | 60S ribosomal protein L10A1 |
| I-SETit.60S_L10A1-2-1:1:1 | 616 | 60S ribosomal protein L10A1 |
| I-SETit.60S_L10A1-3-1:1:1 | 617 | 60S ribosomal protein L10A1 |
| I-SETit.60S_L10A1-5-1:1:1 | 618 | 60S ribosomal protein L10A1 |
| I-SETit.Act1-1:1:1 | 619 | Actin 1 |
| I-SETit.Act1-1:1:2 | 620 | Actin 1 |
| I-SETit.Act1-1:1:3 | 621 | Actin 1 |
| I-SETit.Act1-1:1:4 | 622 | Actin 1 |
| I-SETit.Act2-1:1:1 | 623 | Actin 2 |
| I-SETit.Act3-1:1:1 | 624 | Actin 3 |
| I-SETit.Act3-1:1:2 | 625 | Actin 3 |
| I-SETit.Act4-1:1:1 | 626 | Actin 4 |
| I-SETit.Act4-1:1:2 | 627 | Actin 4 |
| I-SETit.Act6-1:1:1 | 628 | Actin 6 |
| I-SETit.Act6-1:1:2 | 629 | Actin 6 |
| I-SETit.Act6-1:1:3 | 630 | Actin 6 |
| I-SETit.Act6-1:1:4 | 631 | Actin 6 |
| I-SETit.Act7-1:1:1 | 632 | Actin 7 |
| I-SETit.Act7-1:1:2 | 633 | Actin 7 |
| I-SETit.Act7-1:1:3 | 634 | Actin 7 |
| I-SETit.Act8-1:1:1 | 635 | Actin 8 |
| I-SETit.Actin1-1:1:1 | 636 | Actin 1 |
| I-SETit.Arp1_1-1:1:1 | 637 | 60S acidic ribosomal protein |
| | | P2A, putative, expressed |
| I-SETit.Arp1_1-1:1:2 | 638 | 60S acidic ribosomal protein |
| | | P2A, putative, expressed |
| I-SETit.Arp1_1-1:1:3 | 639 | 60S acidic ribosomal protein |
| | | P2A, putative, expressed |
| I-SETit.Arp1_2-1:1:1 | 640 | 60S acidic ribosomal protein |
| | | P2A, putative, expressed |
| I-SETit.Arp1_2-1:1:2 | 641 | 60S acidic ribosomal protein |
| | | P2A, putative, expressed |
| I-SETit.Arp1_3-1:1:1 | 642 | 60S acidic ribosomal protein |
| | | P2A, putative, expressed |
| I-SETit.Arp1_3-1:1:2 | 643 | 60S acidic ribosomal protein |
| | | P2A, putative, expressed |
| I-SETit.ASA2-3-1:1:1 | 644 | Anthranilate Synthase alpha |
| | | 2 subunit |
| I-SETit.CNT-1-1:1:1 | 645 | 2-C-methyl-D-erythritol 4- |
| | | phosphate cytidylyltransferase |
| I-SETit.CNT-2-1:1:1 | 646 | 2-C-methyl-D-erythritol 4- |
| | | phosphate cytidylyltransferase |
| I-SETit.CNT-3-1:1:1 | 647 | 2-C-methyl-D-erythritol 4- |
| | | phosphate cytidylyltransferase |
| I-SETit.Cys-1-1:1:1 | 648 | Cystein protease |
| I-SETit.Cys-2-1:1:1 | 649 | Cystein protease |
| I-SETit.Cys-3-1:1:1 | 650 | Cystein protease |
| I-SETit.DHDPS-1-1:1:1 | 651 | Dihydrodipicolinate synthase |
| | | precursor, chloroplastic |
| I-SETit.DHDPS-2-1:1:1 | 652 | Dihydrodipicolinate synthase |
| | | precursor, chloroplastic |
| I-SETit.DnaJ_1-1:1:1 | 653 | Heat shock protein |
| I-SETit.DnaJ2-1:1:1 | 654 | Heat shock protein |
| I-SETit.DnaJ2-1:1:2 | 655 | Heat shock protein |
| I-SETit.DnaJ3-2-1:1:1 | 656 | Heat shock protein |
| I-SETit.DnaK10-1:1:1 | 657 | Heat shock protein |
| I-SETit.DnaK10-1:1:2 | 658 | Heat shock protein |
| I-SETit.DnaK1-1:1:1 | 659 | Heat shock protein |
| I-SETit.DnaK1-1:1:2 | 660 | Heat shock protein |
| I-SETit.DnaK1-1:1:3 | 661 | Heat shock protein |
| I-SETit.DnaK2-1:1:1 | 662 | Heat shock protein |
| I-SETit.DnaK5-1:1:1 | 663 | Heat shock protein |
| I-SETit.DnaK5-1:1:2 | 664 | Heat shock protein |
| I-SETit.DnaK6-1:1:1 | 665 | Heat shock protein |
| I-SETit.DnaK6-1:1:2 | 666 | Heat shock protein |
| I-SETit.DnaK8-1:1:1 | 667 | Heat shock protein |
| I-SETit.DnaK8-1:1:2 | 668 | Heat shock protein |
| I-SETit.DnaK8-1:1:3 | 669 | Heat shock protein |
| I-SETit.DnaK9-1:1:1 | 670 | Heat shock protein |
| I-SETit.DnaK9-1:1:2 | 671 | Heat shock protein |
| I-SETit.DnaK9-1-1:1:1 | 672 | Heat shock protein |
| I-SETit.eEF1a_1-1:1:1 | 673 | Elongation factor 1 alpha |
| I-SETit.eEF1a_1-1:1:2 | 674 | Elongation factor 1 alpha |
| I-SETit.eEF1a_2-1:1:1 | 675 | Elongation factor 1 alpha |
| I-SETit.eEF1a_2-1:1:2 | 676 | Elongation factor 1 alpha |
| I-SETit.eEF1a_3-1:1:1 | 677 | Elongation factor 1 alpha |
| I-SETit.eEF1a_3-1:1:2 | 678 | Elongation factor 1 alpha |
| I-SETit.eEF1a_4-1:1:1 | 679 | Elongation factor 1 alpha |
| I-SETit.eEF1a_4-1:1:2 | 680 | Elongation factor 1 alpha |
| I-SETit.eEF1a_5-1:1:1 | 681 | Elongation factor 1 alpha |
| I-SETit.eEF1a_5-1:1:2 | 682 | Elongation factor 1 alpha |
| I-SETit.eEF1a_6-1:1:1 | 683 | Elongation factor 1 alpha |
| I-SETit.eEF1a_6-1:1:2 | 684 | Elongation factor 1 alpha |
| I-SETit.eEF1a_7-1:1:1 | 685 | Elongation factor 1 alpha |
| I-SETit.eEF1a_7-1:1:2 | 686 | Elongation factor 1 alpha |
| I-SETit.eEF1a_7-1:1:3 | 687 | Elongation factor 1 alpha |
| I-SETit.eEF1g_1-1:1:1 | 688 | Elongation Factor 1 gamma |
| I-SETit.eEF1g_2-1:1:1 | 689 | Elongation Factor 1 gamma |
| I-SETit.eEF1g_2-1:1:2 | 690 | Elongation Factor 1 gamma |
| I-SETit.eEF1g_2-1:1:3 | 691 | Elongation Factor 1 gamma |
| I-SETit.eEF1g_3-1:1:1 | 692 | Elongation Factor 1 gamma |
| I-SETit.eEF1g_3-1:1:2 | 693 | Elongation Factor 1 gamma |
| I-SETit.eEF1g_4-1:1:1 | 694 | Elongation Factor 1 gamma |
| I-SETit.eEF1g_4-1:1:2 | 695 | Elongation Factor 1 gamma |
| I-SETit.eEF1g3-2-1:1:1 | 696 | Elongation Factor 1 gamma |
| I-SETit.eEF1g3-3-1:1:1 | 697 | Elongation Factor 1 gamma |
| I-SETit.eEF2-1:1:1 | 698 | Elongation Factor 2 |
| I-SETit.eEF2-1:1:2 | 699 | Elongation Factor 2 |
| I-SETit.eEF2-1:1:3 | 700 | Elongation Factor 2 |
| I-SETit.eIF5A1-2-1:1:1 | 701 | Elongation Factor 5 alpha |
| I-SETit.eIF5A1-3-1:1:1 | 702 | Elongation Factor 5 alpha |
| I-SETit.eIF5A1-4-1:1:1 | 703 | Elongation Factor 5 alpha |
| I-SETit.eIF5A1-5-1:1:1 | 704 | Elongation Factor 5 alpha |
| I-SETit.eIF5A2-1-1:1:1 | 705 | Elongation Factor 5 alpha |
| I-SETit.eIF5A2-2-1:1:1 | 706 | Elongation Factor 5 alpha |
| I-SETit.eIF5A2-2-1:1:2 | 707 | Elongation Factor 5 alpha |
| I-SETit.eIF5A2-3-1:1:1 | 708 | Elongation Factor 5 alpha |
| I-SETit.eIF5A2-4-1:1:1 | 709 | Elongation Factor 5 alpha |
| I-SETit.eIF5A2-5-1:1:1 | 710 | Elongation Factor 5 alpha |
| I-SETit.eIF5A3-2-1:1:1 | 711 | Elongation Factor 5 alpha |
| I-SETit.eIF5A3-3-1:1:1 | 712 | Elongation Factor 5 alpha |
| I-SETit.eIF5A3-4-1:1:1 | 713 | Elongation Factor 5 alpha |
| I-SETit.eIF5A3-5-1:1:1 | 714 | Elongation Factor 5 alpha |
| I-SETit.Ein3-1:1:1 | 715 | Ethylene-insensitive 3-like |
| | | protein |
| I-SETit.EIN3-1:1:1 | 716 | Ethylene-insensitive 3-like |
| | | protein |
| I-SETit.GAD_1-1:1:1 | 717 | UDP-glucuronic acid |
| | | decarboxylase |
| I-SETit.GAD_2-1:1:1 | 718 | UDP-glucuronic acid |
| | | decarboxylase |
| I-SETit.GAD_3-1:1:1 | 719 | UDP-glucuronic acid |
| | | decarboxylase |
| I-SETit.GAD_4-1:1:1 | 720 | UDP-glucuronic acid |
| | | decarboxylase |
| I-SETit.Grf1-1:1:1 | 721 | Putative growth-regulating factor |
| I-SETit.Grf2-1:1:1 | 722 | Putative growth-regulating factor |
| I-SETit.Grf3-1:1:1 | 723 | Putative growth-regulating factor |
| I-SETit.Grp-1:1:1 | 724 | Glycine-rich RNA binding protein |
| I-SETit.HDh-1:1:1 | 725 | Aquaporin |
| I-SETit.I-SETit.PIP1-1_2-1:1:1 | 726 | Aquaporin |
| I-SETit.I-SETit.PIP1-1_3-1:1:1 | 727 | Aquaporin |
| I-SETit.I-SETit.PIP2-2_2-1:1:1- | 728 | Aquaporin |
| 1:1:1 | | |
| I-SETit.LSm80-1-1:1:1 | 729 | U6 snRNA-associated Sm-like |
| | | protein LSm80 |
| I-SETit.LSm80-2-1:1:1 | 730 | U6 snRNA-associated Sm-like |
| | | protein LSm80 |
| I-SETit.LSm80-3-1:1:1 | 731 | U6 snRNA-associated Sm-like |
| | | protein LSm80 |
| I-SETit.LSm80-4-1:1:1 | 732 | U6 snRNA-associated Sm-like |
| | | protein LSm80 |
| I-SETit.LSm8-1-1:1:1 | 733 | U6 snRNA-associated Sm-like |
| | | protein LSm8 |
| I-SETit.LSm8-4-1:1:1 | 734 | U6 snRNA-associated Sm-like |
| | | protein LSm8 |
| I-SETit.MDH-1:1:1 | 735 | Putative NAD-malate |
| | | dehydrogenase |
| I-SETit.Nab-1:1:1 | 736 | Nucleic acid binding protein |
| I-SETit.NAB-1:1:1 | 737 | Nucleic acid binding protein |
| I-SETit.NADP-Me-1:1:1 | 738 | NADP malate enzyme |
| I-SETit.NADP-Me-1:1:2 | 739 | NADP malate enzyme |
| I-SETit.PGK1-1:1:1 | 740 | Phosphoglycerate kinase |
| I-SETit.PGK1-1:1:2 | 741 | Phosphoglycerate kinase |
| I-SETit.Pgk1-1-1:1:1 | 742 | Phosphoglycerate kinase |
| I-SETit.Pgk1-2-1:1:1 | 743 | Phosphoglycerate kinase |
| I-SETit.PGK3_1-1:1:1 | 744 | Phosphoglycerate kinase |
| I-SETit.PIP1_3_2-1:1:1 | 745 | Aquaporin |
| I-SETit.PIP1-1_2-1:1:1 | 746 | Aquaporin |
| I-SETit.PIP1-1_3-1:1:1 | 747 | Aquaporin |
| I-SETit.PIP1-3_3-1:1:1 | 748 | Aquaporin |
| I-SETit.PIP1-4_3-1:1:1 | 749 | Aquaporin |
| I-SETit.PIP2-2_2-1:1:1 | 750 | Aquaporin |
| I-SETit.PIP2-2_3-1:1:1 | 751 | Aquaporin |
| I-SETit.PIP2-5_2-1:1:1 | 752 | Aquaporin |
| I-SETit.PIP2-5_3-1:1:1 | 753 | Aquaporin |
| I-SETit.PPR-1:1:1 | 754 | Pentatricopeptide repeat- |
| | | containing protein |
| I-SETit.Prx17-1-1:1:1 | 755 | Peroxidase 17 |
| I-SETit.Prx3-1-1:1:1 | 756 | Peroxidase 3 |
| I-SETit.Prx3-2-1:1:1 | 757 | Peroxidase 3 |
| I-SETit.PSRP-3-1:1:1 | 758 | Plastid and cyanobacterial |
| | | ribosomal protein |
| I-SETit.RbcS_1-1:1:1 | 759 | Small subunit RUBISCO |
| I-SETit.RbcS_2-1:1:1 | 760 | Small subunit RUBISCO |
| I-SETit.RbcS_3-1:1:1 | 761 | Small subunit RUBISCO |
| I-SETit.RbcS_4-1:1:1 | 762 | Small subunit RUBISCO |
| I-SETit.Rps7-2_2-1:1:1 | 763 | 40S-7S-2 family protein |
| I-SETit.Rps7-2_3-1:1:1 | 764 | 40S-7S-2 family protein |
| I-SETit.Rps7-2_4-1:1:1 | 765 | 40S-7S-2 family protein |
| I-SETit.SBD-1-1:1:1 | 766 | Shwachman-Bodian-Diamond |
| | | syndrome protein |
| I-SETit.SBD-3-1:1:1 | 767 | Shwachman-Bodian-Diamond |
| | | syndrome protein |
| I-SETit.SBS-2-1:1:1 | 768 | Shwachman-Bodian-Diamond |
| | | syndrome protein |
| I-SETit.SETit.eEF1g_4-1:1:1 | 769 | Elongation Factor 1 gamma |
| I-SETit.ThioR-1:1:1 | 770 | Thioreductase |
| I-SETit.TubA2_3-1:1:2 | 771 | Tubulin A2 |
| I-SETit.TubA2-1:1:1 | 772 | Tubulin A2 |
| I-SETit.TubA2-2-1:1:1 | 773 | Tubulin A2 |
| I-SETit.TubA2-3-1:1:1 | 774 | Tubulin A2 |
| I-SETit.TubA3_1-1:1:2 | 775 | Tubulin A3 |
| I-SETit.TubA3_2-1:1:2 | 776 | Tubulin A3 |
| I-SETit.Ubq5-1:1:1 | 777 | Ubiquitin 5 |
| I-SETit.Wx1-1-1:1:1 | 778 | Putative granule bound starch |
| | | synthase |
| T-SETit.36384-1:1:1 | 779 | Cluster 36384 |
| T-SETit.37025-1:1:1 | 780 | Cluster 37025 |
| T-SETit.37470-1:1:1 | 781 | Cluster 37470 |
| T-SETit.Ams2-1:1:1 | 782 | S-adenosylmethionine |
| | | synthetase 2 |
| T-SETit.Atps-1:1:1 | 783 | ATP synthase subunit gamma |
| T-SETit.Cab-1:1:1 | 784 | Chlorophyll a/b binding protein |
| T-SETit.Cab1-1:1:1 | 785 | Chlorophyll a/b binding protein |
| T-SETit.Ctpt-1:1:1 | 786 | Triose phosphate/phosphate |
| | | translocator, chloroplast precursor |
| T-SETit.DnaK-1:1:1 | 787 | Heat shock protein |
| T-SETit.Fba-1:1:2 | 788 | Fructose-bisphosphate aldolase |
| T-SETit.Fba-1:1:3 | 789 | Fructose-bisphosphate aldolase |
| T-SETit.Fba-1:1:4 | 790 | Fructose-bisphosphate aldolase |
| T-SETit.Gapdh-1:1:1 | 791 | Glyceraldehyde-3-phosphate |
| | | dehydrogenase |
| T-SETit.MES2_nno-1:1:1 | 792 | Methionine synthase 2 |
| T-SETit.Oep-1:1:1 | 793 | 33 kDa oxygen evolving protein |
| T-SETit.Pea-1:1:1 | 794 | Proton-exporting ATPase |
| T-SETit.Pod-1:1:1 | 795 | pyruvate orthophosphate dikinase |
| T-SETit.Ppc-1:1:1 | 796 | Phosphoenolpyruvate carboxylase |
| T-SETit.Psi-K-1:1:1 | 797 | Photosystem I reaction center |
| | | subunit |
| T-SETit.Psi-L-1:1:1 | 798 | Photosystem I reaction center |
| | | subunit |
| T-SETit.Rfe-s-1:1:1 | 799 | Rieske Fe-S |
| T-SETit.TubA-1:1:1 | 800 | Tubulin A |
| T-contig00388 | 801 | Root 3′ UTR |
| T-contig05482 | 802 | Root 3′ UTR |
| T-contig08555 | 803 | Root 3′ UTR |
| T-contig08556 | 804 | Root 3′ UTR |
| T-contig09485 | 805 | Root 3′ UTR |
| T-contig13749 | 806 | Root 3′ UTR |
| T-contig16157 | 807 | Root 3′ UTR |
| T-contig18936 | 808 | Root 3′ UTR |
| T-contig18994 | 809 | Root 3′ UTR |
| T-contig21387 | 810 | Root 3′ UTR |
| T-contig23385 | 811 | Root 3′ UTR |
| T-contig24188 | 812 | Root 3′ UTR |
| T-contig24188 | 813 | Root 3′ UTR |
| T-contig24832 | 814 | Root 3′ UTR |
| T-contig24890 | 815 | Root 3′ UTR |
| T-contig24916 | 816 | Root 3′ UTR |
| T-contig25097 | 817 | Root 3′ UTR |
| T-contig25509 | 818 | Root 3′ UTR |
| T-contig25584 | 819 | Root 3′ UTR |
| T-contig26532 | 820 | Root 3′ UTR |
| T-contig28013 | 821 | Root 3′ UTR |
| T-contig29922 | 822 | Root 3′ UTR |
| T-contig34261 | 823 | Root 3′ UTR |
| T-contig34311 | 824 | Root 3′ UTR |
| T-contig34749 | 825 | Root 3′ UTR |
| T-contig35408 | 826 | Root 3′ UTR |
| T-contig35550 | 827 | Root 3′ UTR |
| T-contig35785 | 828 | Root 3′ UTR |
| T-contig35943 | 829 | Root 3′ UTR |
| T-contig36050 | 830 | Root 3′ UTR |
| T-contig36266 | 831 | Root 3′ UTR |
| T-contig36378 | 832 | Root 3′ UTR |
| T-contig36502 | 833 | Root 3′ UTR |
| T-contig36728 | 834 | Root 3′ UTR |
| T-contig36811 | 835 | Root 3′ UTR |
| T-contig36883 | 836 | Root 3′ UTR |
| T-contig37316 | 837 | Root 3′ UTR |
| T-contig37476 | 838 | Root 3′ UTR |
| T-contig37510 | 839 | Root 3′ UTR |
| T-contig37704 | 840 | Root 3′ UTR |
| T-contig37883 | 841 | Root 3′ UTR |
| T-contig37920 | 842 | Root 3′ UTR |
| T-contig37959 | 843 | Root 3′ UTR |
| T-contig37976 | 844 | Root 3′ UTR |
| T-contig38003 | 845 | Root 3′ UTR |
| T-SETIT-28JUL09- | 846 | Root 3′ UTR |
| CLUS3016_12 | | |
| T-10SETIT-28JUL09- | 847 | Constitutive 3′ UTR |
| CLUS1332_4 | | |
| T-17SETIT-28JUL09- | 848 | Constitutive 3′ UTR |
| CLUS1910_15 | | |
| T-7SETIT-28JUL09- | 849 | Constitutive 3′ UTR |
| CLUS2844_11 | | |
| T-contig00006 | 850 | Constitutive 3′ UTR |
| T-contig00142 | 851 | Constitutive 3′ UTR |
| T-contig00191 | 852 | Constitutive 3′ UTR |
| T-contig00205 | 853 | Constitutive 3′ UTR |
| T-contig00242 | 854 | Constitutive 3′ UTR |
| T-contig00263 | 855 | Constitutive 3′ UTR |
| T-contig01883 | 856 | Constitutive 3′ UTR |
| T-contig02157 | 857 | Constitutive 3′ UTR |
| T-contig02856 | 858 | Constitutive 3′ UTR |
| T-contig02883 | 859 | Constitutive 3′ UTR |
| T-contig04253 | 860 | Constitutive 3′ UTR |
| T-contig05397 | 861 | Constitutive 3′ UTR |
| T-contig05720 | 862 | Constitutive 3′ UTR |
| T-contig10626 | 863 | Constitutive 3′ UTR |
| T-contig10874 | 864 | Constitutive 3′ UTR |
| T-contig11193 | 865 | Constitutive 3′ UTR |
| T-contig14970 | 866 | Constitutive 3′ UTR |
| T-contig26892 | 867 | Constitutive 3′ UTR |
| T-contig32186 | 868 | Constitutive 3′ UTR |
| T-contig32187 | 869 | Constitutive 3′ UTR |
| T-contig33439 | 870 | Constitutive 3′ UTR |
| T-contig33682 | 871 | Constitutive 3′ UTR |
| T-contig34270 | 872 | Constitutive 3′ UTR |
| T-contig34378 | 873 | Constitutive 3′ UTR |
| T-contig35132 | 874 | Constitutive 3′ UTR |
| T-contig35270 | 875 | Constitutive 3′ UTR |
| T-contig35388 | 876 | Constitutive 3′ UTR |
| T-contig35412 | 877 | Constitutive 3′ UTR |
| T-contig35488 | 878 | Constitutive 3′ UTR |
| T-contig35982 | 879 | Constitutive 3′ UTR |
| T-contig36384 | 880 | Constitutive 3′ UTR |
| T-contig36588 | 881 | Constitutive 3′ UTR |
| T-contig36702 | 882 | Constitutive 3′ UTR |
| T-contig36980 | 883 | Constitutive 3′ UTR |
| T-contig36992 | 884 | Constitutive 3′ UTR |
| T-contig36993 | 885 | Constitutive 3′ UTR |
| T-contig37025 | 886 | Constitutive 3′ UTR |
| T-contig37162 | 887 | Constitutive 3′ UTR |
| T-contig37351 | 888 | Constitutive 3′ UTR |
| T-contig37386 | 889 | Constitutive 3′ UTR |
| T-contig37448 | 890 | Constitutive 3′ UTR |
| T-contig37456 | 891 | Constitutive 3′ UTR |
| T-contig37638 | 892 | Constitutive 3′ UTR |
| T-contig37732 | 893 | Constitutive 3′ UTR |
| T-contig37897 | 894 | Constitutive 3′ UTR |
| T-contig37927 | 895 | Constitutive 3′ UTR |
| T-contig37962 | 896 | Constitutive 3′ UTR |
| T-contig37980 | 897 | Constitutive 3′ UTR |
| T-SETIT-28JUL09- | 898 | Constitutive 3′ UTR |
| CLUS11107_1 | | |
| T-SETIT-28JUL09- | 899 | Constitutive 3′ UTR |
| CLUS11705_1 | | |
| T-SETIT-28JUL09- | 900 | Constitutive 3′ UTR |
| CLUS11899_1 | | |
| T-SETIT-28JUL09- | 901 | Constitutive 3′ UTR |
| CLUS12698_2 | | |
| T-SETIT-28JUL09- | 902 | Constitutive 3′ UTR |
| CLUS13580_1 | | |
| T-SETIT-28JUL09- | 903 | Constitutive 3′ UTR |
| CLUS1404_1 | | |
| T-SETIT-28JUL09- | 904 | Constitutive 3′ UTR |
| CLUS14743_1 | | |
| T-SETIT-28JUL09- | 905 | Constitutive 3′ UTR |
| CLUS181186_1 | | |
| T-SETIT-28JUL09- | 906 | Constitutive 3′ UTR |
| CLUS19095_1 | | |
| T-SETIT-28JUL09- | 907 | Constitutive 3′ UTR |
| CLUS1910_13 | | |
| T-SETIT-28JUL09- | 908 | Constitutive 3′ UTR |
| CLUS1910_14 | | |
| T- | 909 | Constitutive 3′ UTR |
| SETIT28JUL09CLUS1910_16 | | |
| T- | 910 | Constitutive 3′ UTR |
| SETIT28JUL09CLUS1910_17 | | |
| T-SETIT-28JUL09- | 911 | Constitutive 3′ UTR |
| CLUS1910_18 | | |
| T-SETIT-28JUL09- | 912 | Constitutive 3′ UTR |
| CLUS1910_19 | | |
| T-SETIT-28JUL09- | 913 | Constitutive 3′ UTR |
| CLUS2157_4 | | |
| T-SETIT-28JUL09- | 914 | Constitutive 3′ UTR |
| CLUS2166_1 | | |
| T-SETIT-28JUL09- | 915 | Constitutive 3′ UTR |
| CLUS243_3 | | |
| T-SETIT-28JUL09- | 916 | Constitutive 3′ UTR |
| CLUS3485_1 | | |
| T-SETIT-28JUL09- | 917 | Constitutive 3′ UTR |
| CLUS364_1 | | |
| T-SETIT-28JUL09- | 918 | Constitutive 3′ UTR |
| CLUS36567_1 | | |
| T-SETIT-28JUL09- | 919 | Constitutive 3′ UTR |
| CLUS42130_1 | | |
| T-SETIT-28JUL09- | 920 | Constitutive 3′ UTR |
| CLUS52844_1 | | |
| T-SETIT-28JUL09- | 921 | Constitutive 3′ UTR |
| CLUS7004_1 | | |
| T-SETIT-28JUL09- | 922 | Constitutive 3′ UTR |
| CLUS83_23 | | |
| T-SETIT-28JUL09- | 923 | Constitutive 3′ UTR |
| CLUS937_1 | | |
| T-SETIT-28JUL09- | 924 | Constitutive 3′ UTR |
| CLUS95524_1 | | |

[0091] Two size variants of the Foxtail millet Act8 (Actin 8) promoter are presented in Table 1. Alignment of the size variants for the Actin 8 promoter is provided in FIGS. 1a through 1c. The promoter, P-SETit.Act8-1:1:5 (SEQ ID NO: 24) is 1419 nucleotides in length. The promoter, P-SETit.Act8-1:1:6 (SEQ ID NO: 25) is comprised of a 5′ deletion of P-SETit.Act8-1:1:5 (SEQ ID NO: 24) and is 902 nucleotides in length.

[0092] Two size variants of the Foxtail millet Alc1 promoter are presented in Table 1. Alignment of the size variants for the Alc1 promoter is provided in FIGS. 2a through 2c. The promoter, P-SETit.Alc1-1:1:1 (SEQ ID NO: 28) is 1577 nucleotides in length. The promoter, P-SETit.Alc1-1:1:2 (SEQ ID NO: 29) is comprised of a 5′ deletion of P-SETit.Alc1-1:1:1 (SEQ ID NO: 28) and is 412 nucleotides in length.

[0093] Two size variants of the Foxtail millet Cys promoter are presented in Table 1. Alignment of the size variants for the Cys promoter is provided in FIGS. 3a through 3f. The promoter, P-SETit.Cys-1:1:2 (SEQ ID NO: 45) is 3277 nucleotides in length. The promoter, P-SETit.Cys-1:1:3(SEQ ID NO: 46) is comprised of a 5′ deletion of P-SETit.Cys-1:1:2 (SEQ ID NO: 45) and is 2020 nucleotides in length.

[0094] Two size variants of the Foxtail millet Dzs promoter are presented in Table 1. Alignment of the size variants for the Dzs promoter is provided in FIGS. 4a through 4f. The promoter, P-SETit.Dzs-1:1:4 (SEQ ID NO: 47) is 3508 nucleotides in length. The promoter, P-SETit.Dzs-1:1:5 (SEQ ID NO: 48) is comprised of a 5′ deletion of P-SETit.Dzs-1:1:4 (SEQ ID NO: 47) and is 1008 nucleotides in length.

[0095] Two size variants of the Foxtail millet Gst promoter are presented in Table 1. Alignment of the size variants for the Gst promoter is provided in FIGS. 5a through 5c. The promoter, P-SETit.Gst-1:1:1 (SEQ ID NO: 58) is 1681 nucleotides in length. The promoter, P-SETit.Gst-1:1:2 (SEQ ID NO: 59) is comprised of a 5′ deletion of P-SETit.Gst-1:1:1 (SEQ ID NO: 58) and is 428 nucleotides in length.

[0096] Two size variants of the Foxtail millet Ifr promoter are presented in Table 1. Alignment of the size variants for the tfr promoter is provided in FIGS. 6a through 6c. The promoter, P-SETit.Ifr-1:1:2 (SEQ ID NO: 60) is 1280 nucleotides in length. The promoter, P-SETit.Ifr-1:1:3 (SEQ ID NO: 61) is comprised of a 5′ deletion of P-SETit.Ifr-1:1:2 (SEQ ID NO: 60) and is 275 nucleotides in length.

[0097] Two size variants of the Foxtail millet Nrt2 promoter are presented in Table 1. Alignment of the size variants for the Nrt2 promoter is provided in FIGS. 7a through 7d. The promoter, P-SETit.Nrt2-1:1:2 (SEQ ID NO: 64) is 1866 nucleotides in length. The promoter, P-SETit.Nrt2-1:1:3 (SEQ ID NO: 65) is comprised of a 5′ deletion of P-SETit.Nrt2-1:1:2 (SEQ ID NO: 64) and is 382 nucleotides in length.

[0098] Two size variants of the Foxtail millet Ppc promoter are presented in Table 1. Alignment of the size variants for the Ppc promoter is provided in FIGS. 8a through 8e. The promoter, P-SETit.Ppc-1:1:3 (SEQ ID NO: 74) is 2722 nucleotides in length. The promoter, P-SETit.Ppc-1:1:4 (SEQ ID NO: 75) is comprised of a 5′ deletion of P-SETit.Ppc-1:1:3 (SEQ ID NO: 74) and is 1882 nucleotides in length.

[0099] Two size variants of the Foxtail millet Prx3 promoter are presented in Table 1. Alignment of the size variants for the Prx3 promoter is provided in FIGS. 9a through 9f. The promoter, P-SETit.Prx3-1:1:4 (SEQ ID NO: 83) is 3354 nucleotides in length. The promoter, P-SETit.Prx3-1:1:3 (SEQ ID NO: 82) is comprised of a 5′ deletion of P-SETit.Prx3-1:1:4 (SEQ ID NO: 83) and is 1908 nucleotides in length.

[0100] Three size variants of the Foxtail millet Rcc3 promoter are presented in Table 1. Alignment of the size variants for the Rcc3 promoter is provided in FIGS. 10a through 10f. The promoter, P-SETit.Rcc3-1:1:1 (SEQ ID NO: 88) is 2062 nucleotides in length. The promoter, P-SETit.Rcc3-1:1:16 (SEQ ID NO: 91) is comprised of a 5′ deletion of P-SETit.Rcc3-1:1:1 (SEQ ID NO: 88) and is 2024 nucleotides in length. The promoter, P-SETit.Rcc3-1:1:10 (SEQ ID NO: 89) is comprised of a 5′ deletion of P-SETit.Rcc3-1:1:1 (SEQ ID NO: 88) and is 1563 nucleotides in length. The promoter, P-SETit.Rcc3-1:1:11 (SEQ ID NO: 90) is comprised of a 5′ deletion of P-SETit.Rcc3-1:1:1 (SEQ ID NO: 88) and is 915 nucleotides in length.

[0101] Two size variants of the Foxtail millet Ssp1 promoter are presented in Table 1. Alignment of the size variants for the Ssp1 promoter is provided in FIGS. 11a through 11b. The promoter, P-SETit.Ssp1-1:1:1 (SEQ ID NO: 93) is 1128 nucleotides in length. The promoter, P-SETit.Ssp1-1:1:2 (SEQ ID NO: 94) is comprised of a 5′ deletion of P-SETit.Ssp1-1:1:1 (SEQ ID NO: 93) and is 479 nucleotides in length.

[0102] Two size variants of the Foxtail millet Tip promoter are presented in Table 1. Alignment of the size variants for the Tip promoter is provided in FIGS. 12a through 12d. The promoter, P-SETit.Tip-1:1:4 (SEQ ID NO: 97) is 2108 nucleotides in length. The promoter, P-SETit.Tip-1:1:1 (SEQ ID NO: 96) is comprised of a 5′ deletion of P-SETit.Tip-1:1:4 (SEQ ID NO: 97) and is 917 nucleotides in length.

[0103] Two size variants of the Foxtail millet TubA2-1 promoter are presented in Table 1. Alignment of the size variants for the TubA2-1 promoter is provided in FIGS. 13a through 13d. The promoter, P-SETit.TubA2-1-1:1:2 (SEQ ID NO: 98) is 1593 nucleotides in length. The promoter, P-SETit.TubA2-1-1:1:3 (SEQ ID NO: 99) is comprised of a 5′ deletion of P-SETit.TubA2-1-1:1:2 (SEQ ID NO: 98) and is 856 nucleotides in length.

[0104] Two size variants of the Foxtail millet Ubq1 promoter are presented in Table 1. Alignment of the size variants for the Ubq1 promoter is provided in FIGS. 14a through 14c. The promoter, P-SETit.Ubq1-1:1:1 (SEQ ID NO: 102) is 1492 nucleotides in length. The promoter, P-SETit.Ubq1-1:1:3 (SEQ ID NO: 103) is comprised of a 5′ deletion of P-SETit.Ubq1-1:1:1 (SEQ ID NO: 102) and is 680 nucleotides in length.

[0105] Compositions derived from any of the promoters presented as SEQ ID NOS: 23 through 105 and SEQ ID NOS: 353 through 536 comprised of internal or 5′ deletions can be built using methods known in the art to improve expression, by removing elements that have either positive or negative effects on expression; or duplicating elements that have either positive or negative effects on expression; or duplicating or removing elements that have tissue or cell specific effects on expression. Compositions derived from any of the promoters presented as SEQ ID NOS: 23 through 105 and SEQ ID NOS: 353 through 536 comprised of 3′ deletions in which the TATA box element or equivalent sequence thereof and downstream sequence is removed can be used to make enhancer elements. Further deletions can be made to remove any elements that have either positive or negative; or tissue specific; or cell specific; or timing specific (such as, but not limited to, circadium rhythms) effects on expression. Any of the promoters presented as SEQ ID NOS: 23 through 105 and SEQ ID NOS: 353 through 536 and the fragments or enhancers derived there from can be used to make chimeric transcriptional regulatory element compositions comprised of any of the promoters presented as SEQ ID NOS: 23 through 105 and SEQ ID NOS: 353 through 536 and the fragments or enhancers derived there from operably linked to other enhancers and promoters. The efficacy of the modifications, duplications or deletions described above on the desired expression aspects of a particular transgene are tested empirically in stable and transient plant assays, since the effect of such alterations to the native promoter composition are not readily predictable and require empirical testing to validate such effects.

[0106] The leader sequences (5′ UTR) presented as SEQ ID NOS: 106 through 171 and SEQ ID NOS: 537 through 588 may be comprised of regulatory elements or may adopt secondary structures that can have an effect on transcription or translation of a transgene. The leader sequences presented as SEQ ID NOS: 106 through 171 and SEQ ID NOS: 537 through 588 can be used to make chimeric regulatory elements that affect transcription or translation of a transgene. In addition, the leader sequences presented as SEQ ID NOS: 106 through 171 and SEQ ID NOS: 537 through 588 can be used to make chimeric leader sequences which affect transcription or translation of a transgene.

[0107] Compositions derived from any of the introns presented as SEQ ID NOS: 172 through 267, SEQ ID NOS: 317 through 323 and SEQ ID NOS: 589 through 778 can be comprised of internal deletions or duplications of cis regulatory elements; or alterations of the 5′ and 3′ sequences comprising the intron/exon splice junctions, can be used to improve expression or specificity of expression when operably linked to a promoter+leader or chimeric promoter+leader and coding sequence. Alterations of the 5′ and 3′ regions comprising the intron/exon splice junction can also be made to reduce the potential for introduction of false start and stop codons begin produced in the resulting transcript after processing and splicing of the messenger RNA. The introns are tested empirically as described below to determine the intron's effect on expression of a transgene.

### Example 2: Analysis of Regulatory Elements Driving GUS in Transgenic Corn

[0108] Corn plants were transformed with plant expression vectors containing the test regulatory elements driving expression of the β-glucuronidase (GUS) transgene, and the resulting plants were analyzed for GUS protein expression.

[0109] Corn plants were transformed with the plant GUS expression constructs, listed in Table 2, below. Regulatory elements and chimeric regulatory elements presented in example 1 were cloned into a base plant expression vector using standard methods known in the art. The resulting plant expression vectors contained a right border region from Agrobacterium tumefaciens, a first transgene cassette to test the regulatory or chimeric regulatory element comprised of, a regulatory or chimeric regulatory element, operably linked to an intron derived from the HSP70 heat shock protein of Zea mays (I-Zm.DnaK-1:1:1, SEQ ID NO: 1102), operably linked to a coding sequence for β-glucuronidase (GUS) that either possessed a processable intron (GUS-2, SEQ ID NO: 1091) or no intron (GUS-1, SEQ ID NO: 1090), operably linked to the Nopaline synthase 3′ termination region from A. tumefaciens (T-AGRtu.nos-1:1:13, SEQ ID NO: 1088) or the 3′ termination region from the rice lipid transfer protein gene (T-Os.LTP-1:1:1, SEQ ID NO: 1089); a second transgene selection cassette used for selection of transformed plant cells that conferred resistance to the herbicide glyphosate (driven by the rice Actin 1 transcriptional regulatory element group, SEQ ID NO: 1098), or alternatively, the antibiotic kanamycin (driven by the rice Actin 1 transcriptional regulatory element group, SEQ ID NO: 1098) and a left border region from A. tumefaciens. The resulting plasmids, pMON109728, pMON112215, pMON116789, pMON116816, pMON116818, pMON116820, pMON116829, pMON120698, pMON120699, pMON120700, pMON120701, pMON120702, pMON120703, pMON120704, pMON120705, pMON120706, pMON120709, pMON120710, pMON120711, pMON120712, pMON120713, pMON127440, pMON127441, pMON127442, pMON127443, pMON127444, pMON127445, pMON127446, pMON127447, pMON127448, pMON127449 and pMON132037 were used to transform corn plants.

TABLE 2
Binary Plant Transformation Constructs, Regulatory or chimeric regulatory
elements, GUS and 3' UTRs.

| Construct | Regulatory Elements | GUS | 3' UTR |
|---|---|---|---|
| pMON109728 | EXP-FMV.35S-SETit.Tip (SEQ ID NO: 8) | GUS-1 | T-AGRtu.nos- |
| | E-FMV.35S-1:1:2 (SEQ ID NO: 351) | | 1:1:13 |
| | P-SETit.Tip-1:1:1 (SEQ ID NO: 96) | | |
| | L-SETit.Tip-1:1:1 (SEQ ID NO: 165) | | |
| pMON112215 | P-SETit.Rcc3-1:1:1 (SEQ ID NO: 88) | GUS-1 | T-AGRtu.nos- |
| | L-SETit.Rcc3-1:1:1 (SEQ ID NO: 161) | | 1:1:13 |
| pMON116789 | P-SETit.Rcc3-1:1:11 (SEQ ID NO: 90) | GUS-1 | T-AGRtu.nos- |
| | L-SETit.Rcc3-1:1:2 (SEQ ID NO: 162) | | 1:1:13 |
| pMON116816 | P-SETit.Rcc3-1:1:11 (SEQ ID NO: 90) | GUS-1 | T-AGRtu.nos- |
| | L-SETit.Rcc3-1:1:2 (SEQ ID NO: 162) | | 1:1:13 |
| pMON116818 | P-SETit.Pox-1:1:1 (SEQ ID NO: 73) | GUS-1 | T-AGRtu.nos- |
| | L-SETit.Pox-1:1:1 (SEQ ID NO: 147) | | 1:1:13 |
| pMON116820 | P-SETit.Gst-1:1:1 (SEQ ID NO: 58) | GUS-1 | T-AGRtu.nos- |
| | L-SETit.Gst-1:1:1 (SEQ ID NO: 135) | | 1:1:13 |
| pMON116829 | P-SETit.Rcc3-1:1:10 (SEQ ID NO: 89) | GUS-1 | T-AGRtu.nos- |
| | L-SETit.Rcc3-1:1:2 (SEQ ID NO: 162) | | 1:1:13 |
| pMON120698 | EXP-FMV.35S-SETit.Rcc3:a (SEQ ID NO: 6) | GUS-2 | T-Os.LTP-1:1:1 |
| | E-FMV.35S-1:1:2 (SEQ ID NO: 351) | | |
| | P-SETit.Rcc3-1:1:10 (SEQ ID NO: 89) | | |
| | L-SETit.Rcc3-1:1:2 (SEQ ID NO: 162) | | |
| pMON120699 | EXP-FMV.35S-SETit.Gst:a (SEQ ID NO: 2) | GUS-2 | T-Os.LTP-1:1:1 |
| | E-FMV.35S-1:1:2 (SEQ ID NO: 351) | | |
| | P-SETit.Gst-1:1:1 (SEQ ID NO: 58) | | |
| | L-SETit.Gst-1:1:1 (SEQ ID NO: 135) | | |
| pMON120700 | EXP-FMV.35S-SETit.Rcc3:b (SEQ ID NO: 7) | GUS-2 | T-Os.LTP-1:1:1 |
| | E-FMV.35S-1:1:2 (SEQ ID NO: 351) | | |
| | P-SETit.Rcc3-1:1:11 (SEQ ID NO: 90) | | |
| | L-SETit.Rcc3-1:1:2 (SEQ ID NO: 162) | | |
| pMON120701 | EXP-FMV.35S-SETit.Pox (SEQ ID NO: 5) | GUS-2 | T-Os.LTP-1:1:1 |
| | E-FMV.35S-1:1:2 (SEQ ID NO: 351) | | |
| | P-SETit.Pox-1:1:1 (SEQ ID NO: 73) | | |
| | L-SETit.Pox-1:1:1 (SEQ ID NO: 147) | | |
| pMON120702 | P-SETit.Ccoamt-1:1:2 (SEQ ID NO: 35) | GUS-2 | T-Os.LTP-1:1:1 |
| | L-SETit.Ccoamt-1:1:2 (SEQ ID NO: 116) | | |
| pMON120703 | EXP-FMV.35S-SETit.Ccoamt (SEQ ID NO: 1) | GUS-2 | T-Os.LTP-1:1:1 |
| | E-FMV.35S-1:1:2 (SEQ ID NO: 351) | | |
| | P-SETit.Ccoamt-1:1:2 (SEQ ID NO: 35) | | |
| | L-SETit.Ccoamt-1:1:2 (SEQ ID NO: 116) | | |
| pMON120704 | P-SETit.Gst-1:1:2 (SEQ ID NO: 59) | GUS-2 | T-Os.LTP-1:1:1 |
| | L-SETit.Gst-1:1:1 (SEQ ID NO: 135) | | |
| pMON120705 | EXP-FMV.35S-SETit.Gst:b (SEQ ID NO: 3) | GUS-2 | T-Os.LTP-1:1:1 |
| | E-FMV.35S-1:1:2 (SEQ ID NO: 351) | | |
| | P-SETit.Gst-1:1:2 (SEQ ID NO: 59) | | |
| | L-SETit.Gst-1:1:1 (SEQ ID NO: 135) | | |
| pMON120706 | EXP-FMV.35S-SETit.Ifr (SEQ ID NO: 4) | GUS-2 | T-Os.LTP-1:1:1 |
| | E-FMV.35S-1:1:2 (SEQ ID NO: 351) | | |
| | P-SETit.Ifr-1:1:3 (SEQ ID NO: 61) | | |
| | L-SETit.Ifr-1:1:1 (SEQ ID NO: 136) | | |
| pMON120709 | P-SETit.Nrt2-1:1:3 (SEQ ID NO: 65) | GUS-2 | T-Os.LTP-1:1:1 |
| | L-SETit.Nrt2-1:1:2 (SEQ ID NO: 139) | | |
| pMON120710 | P-SETit.Nrt2-1:1:2 (SEQ ID NO: 64) | GUS-2 | T-Os.LTP-1:1:1 |
| | L-SETit.Nrt2-1:1:2 (SEQ ID NO: 139) | | |
| pMON120711 | P-SETit.Pip2-1:1:3 (SEQ ID NO: 71) | GUS-2 | T-Os.LTP-1:1:1 |
| | L-SETit.Pip2-1:1:1 (SEQ ID NO: 145) | | |
| pMON120712 | P-SETit.Ifr-1:1:2 (SEQ ID NO: 60) | GUS-2 | T-Os.LTP-1:1:1 |
| | L-SETit.Ifr-1:1:1 (SEQ ID NO: 136) | | |
| pMON120713 | P-SETit.Ifr-1:1:3 (SEQ ID NO: 61) | GUS-2 | T-Os.LTP-1:1:1 |
| | L-SETit.Ifr-1:1:1 (SEQ ID NO: 136) | | |
| pMON127440 | P-SETit.Ppc-1:1:3 (SEQ ID NO: 74) | GUS-2 | T-Os.LTP-1:1:1 |
| | L-SETit.Ppc-1:1:1 (SEQ ID NO: 148) | | |
| pMON127441 | P-SETit.Ppc-1:1:4 (SEQ ID NO: 75) | GUS-2 | T-Os.LTP-1:1:1 |
| | L-SETit.Ppc-1:1:1 (SEQ ID NO: 148) | | |
| pMON127442 | P-SETit.Gapdh2-1:1:3 (SEQ ID NO: 55) | GUS-2 | T-Os.LTP-1:1:1 |
| | L-SETit.Gapdh2-1:1:1 (SEQ ID NO: 133) | | |
| pMON127443 | EXP-SETit.Ppdk:1:1 (SEQ ID NO: 14) | GUS-2 | T-Os.LTP-1:1:1 |
| | P-SETit.Ppdk-1:1:1 (SEQ ID NO: 76) | | |
| | L-SETit.Ppdk-1:1:4 (SEQ ID NO: 150) | | |
| | I-SETit.Ppdk-1:1:1 (SEQ ID NO: 175) | | |
| | L-SETit.Ppdk-1:1:2 (SEQ ID NO: 149) | | |
| pMON127444 | P-SETit.CP29-1:1:4 (SEQ ID NO: 42) | GUS-2 | T-Os.LTP-1:1:1 |
| | L-SETit.CP29-1:1:1 (SEQ ID NO: 124) | | |
| pMON127445 | P-SETit.Cab3-1:1:3 (SEQ ID NO: 33) | GUS-2 | T-Os.LTP-1:1:1 |
| | L-SETit.Cab3-1:1:1 (SEQ ID NO: 114) | | |
| pMON127446 | P-SETit.PSI-4a-1:1:1 (SEQ ID NO: 86) | GUS-2 | T-Os.LTP-1:1:1 |
| | L-SETit.PSI-4a-1:1:1 (SEQ ID NO: 159) | | |
| pMON127447 | P-SETit.Rbcs-1:1:1 (SEQ ID NO: 87) | GUS-2 | T-Os.LTP-1:1:1 |
| | L-SETit.Rbcs-1:1:1 (SEQ ID NO: 160) | | |
| pMON127448 | P-SETit.Cab1-1:1:1 (SEQ ID NO: 32) | GUS-2 | T-Os.LTP-1:1:1 |
| | L-SETit.Cab1-1:1:1 (SEQ ID NO: 113) | | |
| pMON127449 | P-SETit.Fba-1:1:1 (SEQ ID NO: 51) | GUS-2 | T-Os.LTP-1:1:1 |
| | L-SETit.Fba-1:1:1 (SEQ ID NO: 131) | | |
| pMON132037 | EXP-SETit.Ubq1:1:1 (SEQ ID NO: 20) | GUS-2 | T-Os.LTP-1:1:1 |
| | P-SETit.Ubq1-1:1:1 (SEQ ID NO: 102) | | |
| | L-SETit.Ubq1-1:1:1 (SEQ ID NO: 169) | | |
| | I-SETit.Ubq1-1:1:1 (SEQ ID NO: 177) | | |

[0110] The plant transfonnation vector, pMON109728 is comprised of the transcriptional regulatory element group, EXP-FMV.35S-SETit.Tip (SEQ ID NO: 8), which is further comprised of the enhancer element, E-FMV.35S-1:1:2 (SEQ ID NO: 351),operably linked 5′ to the promoter element, P-SETit.Tip-1:1:1 (SEQ ID NO: 96),operably linked 5′ to the leader element, L-SETit.Tip-1:1:1 (SEQ ID NO: 165). The plant transformation vector, pMON112215 is comprised of the promoter element, P-SETit.Rcc3-1:1:1 (SEQ ID NO: 88), operably linked 5′ to the leader element, L-SETit.Rcc3-1:1:1 (SEQ ID NO: 161) The plant transformation vector, pMON116789 is comprised of the promoter element, P-SETit.Rcc3-1:1:11 (SEQ ID NO: 90), operably linked 5′ to the leader element, L-SETit.Rcc3-1:1:2 (SEQ ID NO: 162). The plant transformation vector, pMON116816 is comprised of the promoter element, P-SETit.Rcc3-1:1:11 (SEQ ID NO: 90), operably linked 5′ to the leader element, L-SETit.Rcc3-1:1:2 (SEQ ID NO: 162). The plant transformation vector, pMON116818 is comprised of the promoter element, P-SETit.Pox-1:1:1 (SEQ ID NO: 73), operably linked 5′ to the leader element, L-SETit.Pox-1:1:1 (SEQ ID NO: 147). The plant transformation vector, pMON116820 is comprised of the promoter element, P-SETit.Gst-1:1:1 (SEQ ID NO: 58), operably linked 5′ to the leader element, L-SETit.Gst-1:1:1 (SEQ ID NO: 135). The plant transformation vector, pMON116829 is comprised of the promoter element, P-SETit.Rcc3-1:1:10 (SEQ ID NO: 89), operably linked 5′ to the leader element, L-SETit.Rcc3-1:1:2 (SEQ ID NO: 162). The plant transformation vector, pMON120698 is comprised of the transcriptional regulatory element group, EXP-FMV.35S-SETit.Rcc3:a (SEQ ID NO: 6), which is further comprised of the enhancer element, E-FMV.35S-1:1:2 (SEQ ID NO: 351), operably linked 5′ to the promoter element, P-SETit.Rcc3-1:1:10 (SEQ ID NO: 89), operably linked 5′ to the leader element, L-SETit.Rcc3-1:1:2 (SEQ ID NO: 162). The plant transformation vector, pMON120699 is comprised of the transcriptional regulatory element group, EXP-FMV.35S-SETit.Gst:a (SEQ ID NO: 2), which is further comprised of the enhancer element, E-FMV.35S-1:1:2 (SEQ ID NO: 351), operably linked 5′ to the promoter element, P-SETit.Gst-1:1:1 (SEQ ID NO: 58), operably linked 5′ to the leader element, L-SETit.Gst-1:1:1 (SEQ ID NO: 135). The plant transformation vector, pMON120700 is comprised of the transcriptional regulatory element group, EXP-FMV.35S-SETit.Rcc3:b (SEQ ID NO: 7), which is further comprised of the enhancer element, E-FMV.35S-1:1:2 (SEQ ID NO: 351), operably linked 5′ to the promoter element, P-SETit.Rcc3-1:1:11 (SEQ ID NO: 90), operably linked 5′ to the leader element, L-SETit.Rcc3-1:1:2 (SEQ ID NO: 162). The plant transformation vector, pMON120701 is comprised of the transcriptional regulatory element group, EXP-FMV.35S-SETit.Pox (SEQ ID NO: 5), which is further comprised of the enhancer element, E-FMV.35S-1:1:2 (SEQ ID NO: 351), operably linked 5′ to the promoter element, P-SETit.Pox-1:1:1 (SEQ ID NO: 73), operably linked 5′ to the leader element, L-SETit.Pox-1:1:1 (SEQ ID NO: 147). The plant transformation vector, pMON120702 is comprised of the promoter element, P-SETit.Ccoamt-1:1:2 (SEQ ID NO: 35), operably linked 5′ to the leader element, L-SETit.Ccoamt-1:1:2 (SEQ ID NO: 116). The plant transformation vector, pMON120703 is comprised of the transcriptional regulatory element group, EXP-FMV.35S-SETit.Ccoamt (SEQ ID NO: 1), which is further comprised of the enhancer element, E-FMV.35S-1:1:2 (SEQ ID NO: 351), operably linked 5′ to the promoter element, P-SETit.Ccoamt-1:1:2 (SEQ ID NO: 35), operably linked 5′ to the leader element, L-SETit.Ccoamt-1:1:2 (SEQ ID NO: 116). The plant transformation vector, pMON120704 is comprised of the promoter element, P-SETit.Gst-1:1:2 (SEQ ID NO: 59), operably linked 5′ to the leader element, L-SETit.Gst-1:1:1 (SEQ ID NO: 135). The plant transformation vector, pMON120705 is comprised of the transcriptional regulatory element group, EXP-FMV.35S-SETit.Gst:b (SEQ ID NO: 3), which is further comprised of the enhancer element, E-FMV.35S-1:1:2 (SEQ ID NO: 351), operably linked 5′ to the promoter element, P-SETit.Gst-1:1:2 (SEQ ID NO: 59), operably linked 5′ to the leader element, L-SETit.Gst-1:1:1 (SEQ ID NO: 135). The plant transformation vector, pMON120706 is comprised of the transcriptional regulatory element group, EXP-FMV.35S-SETit.Ifr (SEQ ID NO: 4), which is further comprised of the enhancer element, E-FMV.35S-1:1:2 (SEQ ID NO: 351), operably linked 5′ to the promoter element, P-SETit.Ifr-1:1:3 (SEQ ID NO: 61), operably linked 5′ to the leader element, L-SETit.Ifr-1:1:1 (SEQ ID NO: 136). The plant transformation vector, pMON120709 is comprised of the promoter element, P-SETit.Nrt2-1:1:3 (SEQ ID NO: 65), operably linked 5′ to the leader element, L-SETit.Nrt2-1:1:2 (SEQ ID NO: 139). The plant transformation vector, pMON120710 is comprised of the promoter element, P-SETit.Nrt2-1:1:2 (SEQ ID NO: 64), operably linked 5′ to the leader element, L-SETit.Nrt2-1:1:2 (SEQ ID NO: 139). The plant transformation vector, pMON120711 is comprised of the promoter element, P-SETit.Pip2-1:1:3 (SEQ ID NO: 71), operably linked 5′ to the leader element, L-SETit.Pip2-1:1:1 (SEQ ID NO: 145). The plant transformation vector, pMON120712 is comprised of the promoter element, P-SETit.Ifr-1:1:2 (SEQ ID NO: 60), operably linked 5′ to the leader element, L-SETit.Ifr-1:1:1 (SEQ ID NO: 136). The plant transformation vector, pMON120713 is comprised of the promoter element, P-SETit.Ifr-1:1:3 (SEQ ID NO: 61), operably linked 5′ to the leader element, L-SETit.Ifr-1:1:1 (SEQ ID NO: 136). The plant transformation vector, pMON127440 is comprised of the promoter element, P-SETit.Ppc-1:1:3 (SEQ ID NO: 74), operably linked 5′ to the leader element, L-SETit.Ppc-1:1:1 (SEQ ID NO: 148). The plant transformation vector, pMON127441 is comprised of the promoter element, P-SETit.Ppc-1:1:4 (SEQ ID NO: 75), operably linked 5′ to the leader element, L-SETit.Ppc-1:1:1 (SEQ ID NO: 148) The plant transformation vector, pMON127442 is comprised of the promoter element, P-SETit.Gapdh2-1:1:3 (SEQ ID NO: 55), operably linked 5′ to the leader element, L-SETit.Gapdh2-1:1:1 (SEQ ID NO: 133). The plant transformation vector, pMON127443 is comprised of the transcriptional regulatory element group, EXP-SETit.Ppdk:1:1 (SEQ ID NO: 14),promoter element, P-SETit.Ppdk-1:1:1 (SEQ ID NO: 76), operably linked 5′ to the leader element, L-SETit.Ppdk-1:1:4 (SEQ ID NO: 150), operably linked 5′ to the intron element, I-SETit.Ppdk-1:1:1 (SEQ ID NO: 175), operably linked 5′ to the leader element, L-SETit.Ppdk-1:1:2 (SEQ ID NO: 149). The plant transformation vector, pMON127444 is comprised of the promoter element, P-SETit.CP29-1:1:4 (SEQ ID NO: 42), operably linked 5′ to the leader element, L-SETit.CP29-1:1:1 (SEQ ID NO: 124). The plant transformation vector, pMON127445promoter element, P-SETit.Cab3-1:1:3 (SEQ ID NO: 33), operably linked 5′ to the leader element, L-SETit.Cab3-1:1:1 (SEQ ID NO: 114). The plant transformation vector, pMON127446 is comprised of the promoter element, P-SETit.PSI-4a-1:1:1 (SEQ ID NO: 86), operably linked 5′ to the leader element, L-SETit.PSI-4a-1:1:1 (SEQ ID NO: 159). The plant transformation vector, pMON127447 is comprised of the promoter element, P-SETit.Rbcs-1:1:1 (SEQ ID NO: 87), operably linked 5′ to the leader element, L-SETit.Rbcs-1:1:1 (SEQ ID NO: 160). The plant transformation vector, pMON127448 is comprised of the promoter element, P-SETit.Cab1-1:1:1 (SEQ ID NO: 32), operably linked 5′ to the leader element, L-SETit.Cab1-1:1:1 (SEQ ID NO: 113). The plant transformation vector, pMON127449 is comprised of the promoter element, P-SETit.Fba-1:1:1 (SEQ ID NO: 51), operably linked 5′ to the leader element, L-SETit.Fba-1:1:1 (SEQ ID NO: 131). The plant transformation vector, pMON132037 is comprised of the transcriptional regulatory element group, EXP-SETit.Ubq1:1:1 (SEQ ID NO: 20), which is further comprised of the promoter element, P-SETit.Ubq1-1:1:1 (SEQ ID NO: 102), operably linked 5′ to the leader element, L-SETit.Ubq1-1:1:1 (SEQ ID NO: 169), operably linked 5′ to the intron element, I-SETit.Ubq1-1:1:1 (SEQ ID NO: 177).

[0111] Corn plants were transformed with plant GUS expression constructs, pMON109728, pMON112215, pMON116789, pMON116816, pMON116818, pMON116820, pMON116829, pMON120698, pMON120699, pMON120700, pMON120701, pMON120702, pMON120703, pMON120704, pMON120705, pMON120706, pMON120709, pMON120710, pMON120711, pMON120712, pMON120713, pMON127440, pMON127441, pMON127442, pMON127443, pMON127444, pMON127445, pMON127446, pMON127447, pMON127448, pMON127449 and pMON132037.

[0112] Plants were transformed using Agrobacterium-mediated transformations known to those skilled in the art. Briefly, LH244 corn seed embryos are extracted from surface-sterilized, developing corn kernels approximately 9 to 13 days after pollination. The embryos are co-cultured with Agrobacterium tumefaciens, transformed with the GUS expression constructs for 18 to 28 hours in the dark. The embryos are then transferred to selective media and cultured in the dark for approximately 3 weeks to induce the formation of callus. Following callus induction, the embryo-derived callus tissue is transferred to new media and cultured under light for 5 to 10 days. The callus tissue is then transferred to new media to induce the formation of shoots. After 2 to 3 weeks, the transformed shoots are transferred to rooting medium and cultured to permit the formation of roots. Once sufficient root formation has occurred, the transformed plants are transferred to soil and transferred to the greenhouse. Events containing one or two copies of the transgene cassette are selected for study using real-time PCR methods known to those skilled in the art.

[0113] Histochemical GUS analysis was used for qualitative expression analysis of transformed plants. Whole tissue sections were incubated with GUS staining solution X-Gluc (5-bromo-4-chloro-3-indolyl-b-glucuronide) (1 milligram/milliliter) for an appropriate length of time, rinsed, and visually inspected for blue coloration. GUS activity was qualitatively determined by direct visual inspection or inspection under a microscope using selected plant organs and tissues. The R0 plants were inspected for expression in the roots and leaves.

[0114] For quantitative analysis, total protein was extracted from selected tissues of transformed corn plants. One microgram of total protein was used with the fluorogenic substrate 4-methyleumbelliferyl-β-D-glucuronide (MUG) in a total reaction volume of 50 microliters. The reaction product, 4-methlyumbelliferone (4-MU), is maximally fluorescent at high pH, where the hydroxyl group is ionized. Addition of a basic solution of sodium carbonate simultaneously stops the assay and adjusts the pH for quantifying the fluorescent product. Fluorescence was measured with excitation at 365 nm, emission at 445 nm using a Fluoromax-3 with Micromax Reader, with slit width set at excitation 2 nm and emission 3 nm.

[0115] The average R₀ GUS expression observed for each transformation is presented in Table 3 and 4 below.

TABLE 3
Average R₀ GUS Leaf and Root expression in transgenic corn plants,
transformed with listed construct.

| | Regulatory | V3 | V7 | VT | V3 | V7 | VT |
|---|---|---|---|---|---|---|---|
| Construct | Elements | Root | Root | Root | Leaf | Leaf | Leaf |
| pMON109728 | EXP-FMV.35S- | 11.98 | nd | 14.78 | 423.85 | nd | 11.38 |
| | SETit. Tip (SEQ | | | | | | |
| | ID NO: 8) | | | | | | |
| | E-FMV.35S-1:1:2 | | | | | | |
| | (SEQ ID NO: | | | | | | |
| | 177) | | | | | | |
| | P-SETit. Tip-1:1:1 | | | | | | |
| | (SEQ ID NO: 95) | | | | | | |
| | L-SETit. Tip-1:1:1 | | | | | | |
| | (SEQ ID NO: | | | | | | |
| | 163) | | | | | | |
| pMON112215 | P-SETit.Rcc3- | nd | nd | nd | nd | nd | nd |
| | 1:1:1 (SEQ ID | | | | | | |
| | NO: 88) | | | | | | |
| | L-SETit.Rcc3- | | | | | | |
| | 1:1:1 (SEQ ID | | | | | | |
| | NO: 161) | | | | | | |
| pMON116789 | P-SETit.Rcc3- | 43.43 | nd | 363.90 | 19.09 | 12.16 | 6.58 |
| | 1:1:11 (SEQ ID | | | | | | |
| | NO: 90) | | | | | | |
| | L-SETit.Rcc3- | | | | | | |
| | 1:1:2 (SEQ ID | | | | | | |
| | NO: 162) | | | | | | |
| pMON116816 | P-SETit.Rcc3- | 5.77 | nd | 0.00 | 35.02 | nd | 0.00 |
| | 1:1:11 (SEQ ID | | | | | | |
| | NO: 90) | | | | | | |
| | L-SETit.Rcc3- | | | | | | |
| | 1:1:2 (SEQ ID | | | | | | |
| | NO: 162) | | | | | | |
| pMON116818 | P-SETit.Pox-1:1:1 | 8.10 | nd | 0.00 | 22.96 | 0.00 | 0.00 |
| | (SEQ ID NO: 73) | | | | | | |
| | L-SETit.Pox-1:1:1 | | | | | | |
| | (SEQ ID NO: | | | | | | |
| | 147) | | | | | | |
| pMON116820 | P-SETit.Gst-1:1:1 | 0.00 | nd | 12.06 | 5.21 | 0.00 | 8.85 |
| | (SEQ ID NO: 58) | | | | | | |
| | L-SETit.Gst-1:1:1 | | | | | | |
| | (SEQ ID NO: | | | | | | |
| | 135) | | | | | | |
| PMON116829 | P-SETit.Rcc3- | 20.67 | nd | 0.00 | 0.00 | 0.00 | 0.00 |
| | 1:1:10 (SEQ ID | | | | | | |
| | NO: 89) | | | | | | |
| | L-SETit.Rcc3- | | | | | | |
| | 1:1:2 (SEQ ID | | | | | | |
| | NO: 162) | | | | | | |
| pMON120698 | EXP-FMV.35S- | 0.00 | nd | 12.90 | 0.00 | 0.00 | 0.00 |
| | SETit.Rcc3:a | | | | | | |
| | (SEQ ID NO: 6) | | | | | | |
| | E-FMV.35S-1:1:2 | | | | | | |
| | (SEQ ID NO: | | | | | | |
| | 351) | | | | | | |
| | P-SETit.Rcc3- | | | | | | |
| | 1:1:10 (SEQ ID | | | | | | |
| | NO: 89) | | | | | | |
| | L-SETit.Rcc3- | | | | | | |
| | 1:1:2 (SEQ ID | | | | | | |
| | NO: 162) | | | | | | |
| pMON120699 | EXP-FMV.35S- | 19.42 | nd | 147.75 | 47.82 | 26.76 | 116.51 |
| | SETit.Gst:a (SEQ | | | | | | |
| | ID NO: 2) | | | | | | |
| | E-FMV.35S-1:1:2 | | | | | | |
| | (SEQ ID NO: | | | | | | |
| | 351) | | | | | | |
| | P-SETit.Gst-1:1:1 | | | | | | |
| | (SEQ ID NO: 58) | | | | | | |
| | L-SETit.Gst-1:1:1 | | | | | | |
| | (SEQ ID NO: | | | | | | |
| | 135) | | | | | | |
| pMON120700 | EXP-FMV.35S- | nd | 11.97 | 12.18 | 0.00 | 5.16 | 0.00 |
| | SETit.Rcc3:b | | | | | | |
| | (SEQ ID NO: 7) | | | | | | |
| | E-FMV.35S-1:1:2 | | | | | | |
| | (SEQ ID NO: | | | | | | |
| | 351) | | | | | | |
| | P-SETit.Rcc3- | | | | | | |
| | 1:1:11 (SEQ ID | | | | | | |
| | NO: 90) | | | | | | |
| | L-SETit.Rcc3- | | | | | | |
| | 1:1:2 (SEQ ID | | | | | | |
| | NO: 162) | | | | | | |
| pMON120701 | EXP-FMV.35S- | 10.42 | 35.53 | 22.82 | 0.00 | 0.00 | 0.00 |
| | SETit.Pox (SEQ | | | | | | |
| | ID NO: 5) | | | | | | |
| | E-FMV.35S-1:1:2 | | | | | | |
| | (SEQ ID NO: | | | | | | |
| | 351) | | | | | | |
| | P-SETit.Pox-1:1:1 | | | | | | |
| | (SEQ ID NO: 73) | | | | | | |
| | L-SETit.Pox-1:1:1 | | | | | | |
| | (SEQ ID NO: | | | | | | |
| | 147) | | | | | | |
| pMON120702 | P-SETit.Ccoamt- | 0.00 | nd | 14.98 | 0.00 | 0.00 | 8.81 |
| | 1:1:2 (SEQ ID | | | | | | |
| | NO: 35) | | | | | | |
| | L-SETit.Ccoamt- | | | | | | |
| | 1:1:2 (SEQ ID | | | | | | |
| | NO: 116) | | | | | | |
| pMON120703 | EXP-FMV.35S- | 9.79 | nd | 93.87 | 12.14 | 67.80 | 22.52 |
| | SETit.Ccoamt | | | | | | |
| | (SEQ ID NO: 1) | | | | | | |
| | E-FMV.35S-1:1:2 | | | | | | |
| | (SEQ ID NO: | | | | | | |
| | 351) | | | | | | |
| | P-SETit.Ccoamt- | | | | | | |
| | 1:1:2 (SEQ ID | | | | | | |
| | NO: 35) | | | | | | |
| | L-SETit.Ccoamt- | | | | | | |
| | 1:1:2 (SEQ ID | | | | | | |
| | NO: 116) | | | | | | |
| pMON120704 | P-SETit.Gst-1:1:2 | 7.12 | nd | 24.05 | 0.00 | 8.78 | 0.00 |
| | (SEQ ID NO: 59) | | | | | | |
| | L-SETit.Gst-1:1:1 | | | | | | |
| | (SEQ ID NO: | | | | | | |
| | 135) | | | | | | |
| pMON120705 | EXP-FMV.35S- | 19.48 | nd | 38.27 | 34.28 | 136.79 | 104.30 |
| | SETit.Gst:b (SEQ | | | | | | |
| | ID NO: 3) | | | | | | |
| | E-FMV.35S-1:1:2 | | | | | | |
| | (SEQ ID NO: | | | | | | |
| | 351) | | | | | | |
| | P-SETit.Gst-1:1:2 | | | | | | |
| | (SEQ ID NO: 59) | | | | | | |
| | L-SETit.Gst-1:1:1 | | | | | | |
| | (SEQ ID NO: | | | | | | |
| | 135) | | | | | | |
| pMON120706 | EXP-FMV.35S- | 25.62 | nd | 92.11 | 32.18 | 191.22 | 107.41 |
| | SETit. Ifr (SEQ ID | | | | | | |
| | NO: 4) | | | | | | |
| | E-FMV.35S-1:1:2 | | | | | | |
| | (SEQ ID NO: | | | | | | |
| | 351) | | | | | | |
| | P-SETit.Ifr-1:1:3 | | | | | | |
| | (SEQ ID NO: 61) | | | | | | |
| | L-SETit.Ifr-1:1:1 | | | | | | |
| | (SEQ ID NO: | | | | | | |
| | 136) | | | | | | |
| pMON120709 | P-SETit. Nrt2- | 10.40 | nd | 7.20 | 0.00 | 0.00 | 0.00 |
| | 1:1:3 (SEQ ID | | | | | | |
| | NO: 65) | | | | | | |
| | L-SETit.Nrt2- | | | | | | |
| | 1:1:2 (SEQ ID | | | | | | |
| | NO: 139) | | | | | | |
| pMON120710 | P-SETit.Nrt2- | 17.29 | nd | 11.89 | 0.00 | 0.00 | 0.00 |
| | 1:1:2 (SEQ ID | | | | | | |
| | NO: 64) | | | | | | |
| | L-SETit.Nrt2- | | | | | | |
| | 1:1:2 (SEQ ID | | | | | | |
| | NO: 139) | | | | | | |
| pMON120711 | P-SETit.Pip2- | 168.44 | 36.18 | 14.61 | 22.48 | 0.00 | 7.04 |
| | 1:1:3 (SEQ ID | | | | | | |
| | NO: 71) | | | | | | |
| | L-SETit. Pip2- | | | | | | |
| | 1:1:1 (SEQ ID | | | | | | |
| | NO: 145) | | | | | | |
| pMON120712 | P-SETit.Ifr-1:1:2 | 64.92 | nd | 15.97 | 0.00 | 0.00 | 0.00 |
| | (SEQ ID NO: 60) | | | | | | |
| | L-SETit.Ifr-1:1:1 | | | | | | |
| | (SEQ ID NO: | | | | | | |
| | 136) | | | | | | |
| pMON120713 | P-SETit. Ifr-1:1:3 | 0.00 | nd | 0.00 | 0.00 | 0.00 | 6.38 |
| | (SEQ ID NO: 61) | | | | | | |
| | L-SETit.Ifr-1:1:1 | | | | | | |
| | (SEQ ID NO: | | | | | | |
| | 136) | | | | | | |
| pMON127440 | P-SETit.Ppc-1:1:3 | 0.00 | nd | 0.47 | 0.00 | 0.00 | 37.59 |
| | (SEQ ID NO: 74) | | | | | | |
| | L-SETit.Ppc-1:1:1 | | | | | | |
| | (SEQ ID NO: | | | | | | |
| | 148) | | | | | | |
| pMON127441 | P-SETit.Ppc-1:1:4 | 0.00 | 0.00 | 0.00 | 101.10 | 521.14 | 179.12 |
| | (SEQ ID NO: 75) | | | | | | |
| | L-SETit.Ppc-1:1:1 | | | | | | |
| | (SEQ ID NO: | | | | | | |
| | 148) | | | | | | |
| pMON127442 | P-SETit.Gapdh2- | 0.00 | 0.00 | 0.00 | 13.12 | 0.00 | 0.00 |
| | 1:1:3 (SEQ ID | | | | | | |
| | NO: 55) | | | | | | |
| | L-SETit.Gapdh2- | | | | | | |
| | 1:1:1 (SEQ ID | | | | | | |
| | NO: 133) | | | | | | |
| pMON127443 | EXP- | 0.00 | 0.00 | 5.66 | 32.56 | 21.04 | 58.48 |
| | SETit.Ppdk:1:1 | | | | | | |
| | (SEQ ID NO: 14) | | | | | | |
| | P-SETit.Ppdk- | | | | | | |
| | 1:1:1 (SEQ ID | | | | | | |
| | NO: 76) | | | | | | |
| | L-SETit.Ppdk- | | | | | | |
| | 1:1:4 (SEQ ID | | | | | | |
| | NO: 150) | | | | | | |
| | I-SETit.Ppdk- | | | | | | |
| | 1:1:1 (SEQ ID | | | | | | |
| | NO: 175) | | | | | | |
| | L-SETit.Ppdk- | | | | | | |
| | 1:1:2 (SEQ ID | | | | | | |
| | NO: 149) | | | | | | |
| pMON127444 | P-SETit.CP29- | 0.00 | 6.17 | 0.00 | 165.74 | 348.96 | 249.42 |
| | 1:1:4 (SEQ ID | | | | | | |
| | NO: 42) | | | | | | |
| | L-SETit.CP29- | | | | | | |
| | 1:1:1 (SEQ ID | | | | | | |
| | NO: 124) | | | | | | |
| pMON127445 | P-SETit.Cab3- | <0.1 | <0.1 | <0.1 | 299.16 | 136.85 | 179.80 |
| | 1:1:3 (SEQ ID | | | | | | |
| | NO: 33) | | | | | | |
| | L-SETit.Cab3- | | | | | | |
| | 1:1:1 (SEQ ID | | | | | | |
| | NO: 114) | | | | | | |
| pMON127446 | P-SETit.PSI-4a- | 0.00 | 0.00 | 0.00 | 101.30 | 83.44 | 110.81 |
| | 1:1:1 (SEQ ID | | | | | | |
| | NO: 86) | | | | | | |
| | L-SETit.PSI-4a- | | | | | | |
| | 1:1:1 (SEQ ID | | | | | | |
| | NO: 159) | | | | | | |
| pMON127447 | P-SETit.Rbcs- | 0.00 | 22.74 | 18.69 | 160.14 | 172.65 | 264.89 |
| | 1:1:1 (SEQ ID | | | | | | |
| | NO: 87) | | | | | | |
| | L-SETit.Rbcs- | | | | | | |
| | 1:1:1 (SEQ ID | | | | | | |
| | NO: 160) | | | | | | |
| pMON127448 | P-SETit.Cab1- | 0.16 | 0.00 | 0.00 | 158.08 | 109.59 | 48.01 |
| | 1:1:1 (SEQ ID | | | | | | |
| | NO: 32) | | | | | | |
| | L-SETit.Cab1- | | | | | | |
| | 1:1:1 (SEQ ID | | | | | | |
| | NO: 113) | | | | | | |
| pMON127449 | P-SETit.Fba-1:1:1 | <0.1 | <0.1 | <0.1 | 81.41 | 82.57 | 83.95 |
| | (SEQ ID NO: 51) | | | | | | |
| | L-SETit.Fba-1:1:1 | | | | | | |
| | (SEQ ID NO: | | | | | | |
| | 131) | | | | | | |
| pMON132037 | EXP- | 0.00 | 28.54 | 57.31 | 57.95 | 36.71 | 45.62 |
| | SETit.Ubq1:1:1 | | | | | | |
| | (SEQ ID NO: 20) | | | | | | |
| | P-SETit. Ubq1- | | | | | | |
| | 1:1:1 (SEQ ID | | | | | | |
| | NO: 102) | | | | | | |
| | L-SETit. Ubq1- | | | | | | |
| | 1:1:1 (SEQ ID | | | | | | |
| | NO: 169) | | | | | | |
| | I-SETit. Ubq1- | | | | | | |
| | 1:1:1 (SEQ ID | | | | | | |
| | NO: 177) | | | | | | |

[0116] The average level of GUS expression amongst the constructs varied. Those constructs demonstrating the highest level of root expression, particularly at VT stage were: pMON116789 ((P-SETit.Rcc3-1:1:11 (SEQ ID NO: 90)+L-SETit.Rcc3-1:1:2 (SEQ ID NO: 162)); pMON120699 ((EXP-FMV.35S-SETit.Gst:a (SEQ ID NO: 2), comprised of E-FMV.35S-1:1:2 (SEQ ID NO: 179)+P-SETit.Gst-1:1:1 (SEQ ID NO: 58)+L-SETit.Gst-1:1:1 (SEQ ID NO: 135)); pMON120703 ((EXP-FMV.35S-SETit.Ccoamt (SEQ ID NO: 1), comprised of E-FMV.35S-1:1:2 (SEQ ID NO: 179)+P-SETit.Ccoamt-1:1:2 (SEQ ID NO: 35)+L-SETit.Ccoamt-1:1:2 (SEQ ID NO: 116)); pMON120706 ((EXP-FMV.35S-SETit.1fr (SEQ ID NO: 4) comprised of E-FMV.35S-1:1:2 (SEQ ID NO: 179)+P-SETit.Ifr-1:1:3 (SEQ ID NO: 61)+L-SETit.Ifr-1:1:1 (SEQ ID NO: 136)) and pMON132037 ((EXP-SETit.Ubq1:1:1 (SEQ ID NO: 20) comprised of P-SETit.Ubq1-1:1:1 (SEQ ID NO: 102)+L-SETit.Ubq1-1:1:1 (SEQ ID NO: 169)+I-SETit.Ubq1-1:1:1 (SEQ ID NO: 177)).

[0117] Those constructs demonstrating the highest level of leaf expression were: pMON127447 ((P-SETit.Rbcs-1:1:1 (SEQ ID NO: 87)+L-SETit.Rbcs-1:1:1 (SEQ ID NO: 160)); pMON127444 ((P-SETit.CP29-1:1:4 (SEQ ID NO: 42)+L-SETit.CP29-1:1:1 (SEQ ID NO: 124)); pMON127445 ((P-SETit.Cab3-1:1:3 (SEQ ID NO: 33)+L-SETit.Cab3-1:1:1 (SEQ ID NO: 114)); pMON127441 ((P-SETit.Ppc-1:1:4 (SEQ ID NO: 75)+L-SETit.Ppc-1:1:1 (SEQ ID NO: 148)); pMON120699 ((EXP-FMV.35S-SETit.Gst:a (SEQ ID NO: 2) comprised of E-FMV.35S-1:1:2 (SEQ ID NO: 179)+P-SETit.Gst-1:1:1 (SEQ ID NO: 58)+L-SETit.Gst-1:1:1 (SEQ ID NO: 135)); pMON127446 ((P-SETit.PSI-4a-1:1:1 (SEQ ID NO: 86)+L-SETit.PSI-4a-1:1:1 (SEQ ID NO: 159)); pMON120706 ((EXP-FMV.35S-SETit.Ifr (SEQ ID NO: 4) comprised of E-FMV.35S-1:1:2 (SEQ ID NO: 179)+P-SETit.Ifr-1:1:3 (SEQ ID NO: 61)+L-SETit.Ifr-1:1:1 (SEQ ID NO: 136)); pMON120705 ((EXP-FMV.35S-SETit.Gst:b (SEQ ID NO: 3) comprised of E-FMV.35S-1:1:2 (SEQ ID NO: 179)+P-SETit.Gst-1:1:2 (SEQ ID NO: 59)+L-SETit.Gst-1:1:1 (SEQ ID NO: 135)) and pMON127449 ((P-SETit.Fba-1:1:1 (SEQ ID NO: 51)+L-SETit.Fba-1:1:1 (SEQ ID NO: 131)).

TABLE 4
Average R₀ GUS Anther, Silk, Endosperm and Embryo expression in
transgenic corn plants, transformed with listed construct.

| | | VT | VT | 21 DAP | 21 DAP |
|---|---|---|---|---|---|
| Construct | Regulatory Elements | Anther | Silk | Embryo | Endosperm |
| pMON109728 | EXP-FMV.35S-SETit.Tip | nd | 74.07 | nd | nd |
| | (SEQ ID NO: 8) | | | | |
| | E-FMV.35S-1:1:2 (SEQ ID | | | | |
| | NO: 177) | | | | |
| | P-SETit.Tip-1:1:1 (SEQ ID | | | | |
| | NO: 95) | | | | |
| | L-SETit.Tip-1:1:1 (SEQ ID | | | | |
| | NO: 163) | | | | |
| pMON112215 | P-SETit.Rcc3-1:1:1 (SEQ ID | nd | nd | nd | nd |
| | NO: 88) | | | | |
| | L-SETit.Rcc3-1:1:1 (SEQ ID | | | | |
| | NO: 161) | | | | |
| pMON116789 | P-SETit.Rcc3-1:1:11 (SEQ | 289.88 | 11.83 | nd | nd |
| | ID NO: 90) | | | | |
| | L-SETit.Rcc3-1:1:2 (SEQ ID | | | | |
| | NO: 162) | | | | |
| pMON116816 | P-SETit.Rcc3-1:1:11 (SEQ | 9.66 | 0.00 | 17.06 | 20.16 |
| | ID NO: 90) | | | | |
| | L-SETit.Rcc3-1:1:2 (SEQ ID | | | | |
| | NO: 162) | | | | |
| pMON116818 | P-SETit.Pox-1:1:1 (SEQ ID | 0.00 | 10.12 | 0.00 | 0.00 |
| | NO: 73) | | | | |
| | L-SETit.Pox-1:1:1 (SEQ ID | | | | |
| | NO: 147) | | | | |
| pMON116820 | P-SETit.Gst-1:1:1 (SEQ ID | 19.62 | 8.08 | 14.09 | 15.25 |
| | NO: 58) | | | | |
| | L-SETit.Gst-1:1:1 (SEQ ID | | | | |
| | NO: 135) | | | | |
| PMON116829 | P-SETit.Rcc3-1:1:10 (SEQ | 8.58 | 0.00 | 0.00 | 12.52 |
| | ID NO: 89) | | | | |
| | L-SETit.Rcc3-1:1:2 (SEQ ID | | | | |
| | NO: 162) | | | | |
| pMON120698 | EXP-FMV.35S- | 0.00 | 0.00 | 13.62 | 23.07 |
| | SETit.Rcc3:a (SEQ ID NO: 6) | | | | |
| | E-FMV.35S-1:1:2 (SEQ ID | | | | |
| | NO: 351) | | | | |
| | P-SETit.Rcc3-1:1:10 (SEQ | | | | |
| | ID NO: 89) | | | | |
| | L-SETit.Rcc3-1:1:2 (SEQ ID | | | | |
| | NO: 162) | | | | |
| pMON120699 | EXP-FMV.35S-SETit.Gst:a | 41.63 | 21.74 | 27.03 | 92.79 |
| | (SEQ ID NO: 2) | | | | |
| | E-FMV.35S-1:1:2 (SEQ ID | | | | |
| | NO: 351) | | | | |
| | P-SETit.Gst-1:1:1 (SEQ ID | | | | |
| | NO: 58) | | | | |
| | L-SETit.Gst-1:1:1 (SEQ ID | | | | |
| | NO: 135) | | | | |
| pMON120700 | EXP-FMV.35S- | 7.65 | 0.00 | 0.00 | 11.30 |
| | SETit.Rcc3:b (SEQ ID NO: 7) | | | | |
| | E-FMV.35S-1:1:2 (SEQ ID | | | | |
| | NO: 351) | | | | |
| | P-SETit.Rcc3-1:1:11 (SEQ | | | | |
| | ID NO: 90) | | | | |
| | L-SETit.Rcc3-1:1:2 (SEQ ID | | | | |
| | NO: 162) | | | | |
| pMON120701 | EXP-FMV.35S-SETit.Pox | 55.20 | 77.97 | 0.00 | 10.70 |
| | (SEQ ID NO: 5) | | | | |
| | E-FMV.35S-1:1:2 (SEQ ID | | | | |
| | NO: 351) | | | | |
| | P-SETit.Pox-1:1:1 (SEQ ID | | | | |
| | NO: 73) | | | | |
| | L-SETit.Pox-1:1:1 (SEQ ID | | | | |
| | NO: 147) | | | | |
| pMON120702 | P-SETit.Ccoamt-1:1:2 (SEQ | 33.96 | 0.00 | 0.00 | 6.93 |
| | ID NO: 35) | | | | |
| | L-SETit.Ccoamt-1:1:2 (SEQ | | | | |
| | ID NO: 116) | | | | |
| pMON120703 | EXP-FMV.35S- | 22.01 | 36.65 | 9.23 | 28.99 |
| | SETit.Ccoamt (SEQ ID NO: 1) | | | | |
| | E-FMV.35S-1:1:2 (SEQ ID | | | | |
| | NO: 351) | | | | |
| | P-SETit.Ccoamt-1:1:2 (SEQ | | | | |
| | ID NO: 35) | | | | |
| | L-SETit.Ccoamt-1:1:2 (SEQ | | | | |
| | ID NO: 116) | | | | |
| pMON120704 | P-SETit.Gst-1:1:2 (SEQ ID | 16.43 | 0.00 | nd | nd |
| | NO: 59) | | | | |
| | L-SETit.Gst-1:1:1 (SEQ ID | | | | |
| | NO: 135) | | | | |
| pMON120705 | EXP-FMV.35S-SETit.Gst:b | 156.37 | 46.06 | 39.48 | 82.83 |
| | (SEQ ID NO: 3) | | | | |
| | E-FMV.35S-1:1:2 (SEQ ID | | | | |
| | NO: 351) | | | | |
| | P-SETit.Gst-1:1:2 (SEQ ID | | | | |
| | NO: 59) | | | | |
| | L-SETit.Gst-1:1:1 (SEQ ID | | | | |
| | NO: 135) | | | | |
| pMON120706 | EXP-FMV.35S-SETit.Ifr | 77.35 | 307.35 | 14.27 | 100.43 |
| | (SEQ ID NO: 4) | | | | |
| | E-FMV.35S-1:1:2 (SEQ ID | | | | |
| | NO: 351) | | | | |
| | P-SETit.Ifr-1:1:3 (SEQ ID | | | | |
| | NO: 61) | | | | |
| | L-SETit.Ifr-1:1:1 (SEQ ID | | | | |
| | NO: 136) | | | | |
| pMON120709 | P-SETit.Nrt2-1:1:3 (SEQ ID | 6.90 | 132.25 | 138.75 | 20.39 |
| | NO: 65) | | | | |
| | L-SETit.Nrt2-1:1:2 (SEQ ID | | | | |
| | NO: 139) | | | | |
| pMON120710 | P-SETit.Nrt2-1:1:2 (SEQ ID | 8.60 | 0.00 | 12.49 | 6.52 |
| | NO: 64) | | | | |
| | L-SETit.Nrt2-1:1:2 (SEQ ID | | | | |
| | NO: 139) | | | | |
| pMON120711 | P-SETit.Pip2-1:1:3 (SEQ ID | 15.13 | 6.65 | 10.49 | 0.00 |
| | NO: 71) | | | | |
| | L-SETit.Pip2-1:1:1 (SEQ ID | | | | |
| | NO: 145) | | | | |
| pMON120712 | P-SETit.Ifr-1:1:2 (SEQ ID | 9.64 | 0.00 | 8.26 | 0.00 |
| | NO: 60) | | | | |
| | L-SETit.Ifr-1:1:1 (SEQ ID | | | | |
| | NO: 136) | | | | |
| pMON120713 | P-SETit.Ifr-1:1:3 (SEQ ID | 11.02 | 0.00 | 23.91 | 5.94 |
| | NO: 61) | | | | |
| | L-SETit.Ifr-1:1:1 (SEQ ID | | | | |
| | NO: 136) | | | | |
| pMON127440 | P-SETit.Ppc-1:1:3 (SEQ ID | 18.44 | 1.15 | 0.00 | 0.00 |
| | NO: 74) | | | | |
| | L-SETit.Ppc-1:1:1 (SEQ ID | | | | |
| | NO: 148) | | | | |
| pMON127441 | P-SETit.Ppc-1:1:4 (SEQ ID | 181.79 | 0.00 | 4.10 | 1.17 |
| | NO: 75) | | | | |
| | L-SETit.Ppc-1:1:1 (SEQ ID | | | | |
| | NO: 148) | | | | |
| pMON127442 | P-SETit.Gapdh2-1:1:3 (SEQ | 28.05 | 0.00 | 155.68 | 400.86 |
| | ID NO: 55) | | | | |
| | L-SETit.Gapdh2-1:1:1 (SEQ | | | | |
| | ID NO: 133) | | | | |
| pMON127443 | EXP-SETit.Ppdk:1:1 (SEQ | 0.00 | 0.00 | 2.62 | 0.67 |
| | ID NO: 14) | | | | |
| | P-SETit.Ppdk-1:1:1 (SEQ ID | | | | |
| | NO: 76) | | | | |
| | L-SETit.Ppdk-1:1:4 (SEQ ID | | | | |
| | NO: 150) | | | | |
| | I-SETit.Ppdk-1:1:1 (SEQ ID | | | | |
| | NO: 175) | | | | |
| | L-SETit.Ppdk-1:1:2 (SEQ ID | | | | |
| | NO: 149) | | | | |
| pMON127444 | P-SETit.CP29-1:1:4 (SEQ ID | 87.67 | 24.63 | 0.00 | 0.00 |
| | NO: 42) | | | | |
| | L-SETit.CP29-1:1:1 (SEQ | | | | |
| | ID NO: 124) | | | | |
| pMON127445 | P-SETit.Cab3-1:1:3 (SEQ ID | 35.79 | 35.94 | <0.1 | <0.1 |
| | NO: 33) | | | | |
| | L-SETit.Cab3-1:1:1 (SEQ ID | | | | |
| | NO: 114) | | | | |
| pMON127446 | P-SETit.PSI-4a-1:1:1 (SEQ | 56.44 | 194.45 | 1.64 | 3.24 |
| | ID NO: 86) | | | | |
| | L-SETit.PSI-4a-1:1:1 (SEQ | | | | |
| | ID NO: 159) | | | | |
| pMON127447 | P-SETit.Rbcs-1:1:1 (SEQ ID | 102.30 | 125.45 | 3.25 | 6.58 |
| | NO: 87) | | | | |
| | L-SETit.Rbcs-1:1:1 (SEQ ID | | | | |
| | NO: 160) | | | | |
| pMON127448 | P-SETit.Cab1-1:1:1 (SEQ ID | 61.33 | 22.61 | 2.32 | 4.47 |
| | NO: 32) | | | | |
| | L-SETit.Cab1-1:1:1 (SEQ ID | | | | |
| | NO: 113) | | | | |
| pMON127449 | P-SETit.Fba-1:1:1 (SEQ ID | 12.62 | <0.1 | <0.1 | <0.1 |
| | NO: 51) | | | | |
| | L-SETit.Fba-1:1:1 (SEQ ID | | | | |
| | NO: 131) | | | | |
| pMON132037 | EXP-SETit.Ubq1:1:1 (SEQ | 131.65 | 85.35 | 59.09 | 67.31 |
| | ID NO: 20) | | | | |
| | P-SETit.Ubq1-1:1:1 (SEQ ID | | | | |
| | NO: 102) | | | | |
| | L-SETit.Ubq1-1:1:1 (SEQ | | | | |
| | ID NO: 169) | | | | |
| | I-SETit.Ubq1-1:1:1 (SEQ ID | | | | |
| | NO: 177) | | | | |

[0118] The average level of GUS expression in the seed and reproductive tissues varied amongst the constructs. Highest levels of anther expression at VT stage were observed for pMON116789 ((P-SETit.Rcc3-1:1:11 (SEQ ID NO: 90)+L-SETit.Rcc3-1:1:2 (SEQ ID NO: 162)); pMON127441 ((P-SETit.Ppc-1:1:4 (SEQ ID NO: 75)+L-SETit.Ppc-1:1:1 (SEQ ID NO: 148)); pMON120705 ((EXP-FMV.35S-SETit.Gst:b (SEQ ID NO: 3) comprised of E-FMV.35S-1:1:2 (SEQ ID NO: 179)+P-SETit.Gst-1:1:2 (SEQ ID NO: 59)+L-SETit.Gst-1:1:1 (SEQ ID NO: 135)); pMON132037 ((EXP-SETit.Ubq1:1:1 (SEQ ID NO: 20) comprised of P-SETit.Ubq1-1:1:1 (SEQ ID NO: 102)+L-SETit.Ubq1-1:1:1 (SEQ ID NO: 169)+I-SETit.Ubq1-1:1:1 (SEQ ID NO: 177)); pMON127447 ((P-SETit.Rbcs-1:1:1 (SEQ ID NO: 87)+L-SETit.Rbcs-1:1:1 (SEQ ID NO: 160)); pMON127444 ((P-SETit.CP29-1:1:4 (SEQ ID NO: 42)+L-SETit.CP29-1:1:1 (SEQ ID NO: 124)) and pMON120706 ((EXP-FMV.35S-SETit.Ifr (SEQ ID NO: 4) comprised of E-FMV.35S-1:1:2 (SEQ ID NO: 179)+P-SETit.Ifr-1:1:3 (SEQ ID NO: 61)+L-SETit.Ifr-1:1:1 (SEQ ID NO: 136)).

[0119] The highest levels of average GUS expression in the silk was observed in plants transformed with pMON120706 ((EXP-FMV.35S-SETit.Ifr (SEQ ID NO: 4) comprised of E-FMV.35S-1:1:2 (SEQ ID NO: 179)+P-SETit.Ifr-1:1:3 (SEQ ID NO: 61)+L-SETit.Ifr-1:1:1 (SEQ ID NO: 136)); pMON127446 ((P-SETit.PSI-4a-1:1:1 (SEQ ID NO: 86)+L-SETit.PSI-4a-1:1:1 (SEQ ID NO: 159)); pMON120709 ((P-SETit.Nrt2-1:1:3 (SEQ ID NO: 65)+L-SETit.Nrt2-1:1:2 (SEQ ID NO: 139)); pMON127447 ((P-SETit.Rbcs-1:1:1 (SEQ ID NO: 87)+L-SETit.Rbcs-1:1:1 (SEQ ID NO: 160)) and pMON132037 ((EXP-SETit.Ubq1:1:1 (SEQ ID NO: 20) comprised of P-SETit.Ubq1-1:1:1 (SEQ ID NO: 102)+L-SETit.Ubq1-1:1:1 (SEQ ID NO: 169)+I-SETit.Ubq1-1:1:1 (SEQ ID NO: 177)). Average GUS expression in the developing embryo 21 DAP was observed in plants transformed with pMON127442 ((P-SETit.Gapdh2-1:1:3 (SEQ ID NO: 55)+L-SETit.Gapdh2-1:1:1 (SEQ ID NO: 133)); pMON120709 ((P-SETit.Nrt2-1:1:3 (SEQ ID NO: 65)+L-SETit.Nrt2-1:1:2 (SEQ ID NO: 139)); pMON132037 ((EXP-SETit.Ubq1:1:1 (SEQ ID NO: 20) comprised of P-SETit.Ubq1-1:1:1 (SEQ ID NO: 102)+L-SETit.Ubq1-1:1:1 (SEQ ID NO: 169)+I-SETit.Ubq1-1:1:1 (SEQ ID NO: 177)); pMON120705 ((EXP-FMV.35S-SETit.Gst:b (SEQ ID NO: 3) comprised of E-FMV.35S-1:1:2 (SEQ ID NO: 179)+P-SETit.Gst-1:1:2 (SEQ ID NO: 59)+L-SETit.Gst-1:1:1 (SEQ ID NO: 135)) and pMON120699 ((EXP-FMV.35S-SETit.Gst:a (SEQ ID NO: 2) comprised of E-FMV.35S-1:1:2 (SEQ ID NO: 179)+P-SETit.Gst-1:1:1 (SEQ ID NO: 58)+L-SETit.Gst-1:1:1 (SEQ ID NO: 135)). Average GUS expression was also highest in plants transformed with pMON127442 ((P-SETit.Gapdh2-1:1:3 (SEQ ID NO: 55)+L-SETit.Gapdh2-1:1:1 (SEQ ID NO: 133)) and pMON120709 ((P-SETit.Nrt2-1:1:3 (SEQ ID NO: 65)+L-SETit.Nrt2-1:1:2 (SEQ ID NO: 139))

[0120] Plants transformed with the GUS expression vectors, pMON112215 ((P-SETit.Rcc3-1:1:1 (SEQ ID NO: 88)+L-SETit.Rcc3-1:1:1 (SEQ ID NO: 161)) were crossed with non-transformed LH244 plants to produce an F1 population of transformants. GUS expression levels were measured in selected tissues over the course of development. The F1 tissues used for this study included: imbibed seed embryo, imbibed seed endosperm, root (3 days after germination), coleoptiles (3 days after germination), V3 root, V3 leaf, V7 root, V7 mature leaf, VT (at tasseling, prior to reproduction) seminal root, VT internode, VT cob, VT anther, VT pollen, VT silk, kernel 7 days after pollination, embryo 21 days after pollination, endosperm 21 days after pollination, embryo 35 days after pollination, endosperm 35 days after pollination.

[0121] Drought stress was induced in R₀ V3 plants and in F1 V3 plants by withholding watering for 4 days allowing the water content to be reduced by at least 50% of the original water content of the fully watered plant. The drought protocol was comprised essentially of the following steps. V3 stage plants were deprived of water. As a corn plant experiences drought, the shape of the leaf will change from the usual healthy and unfolded appearance to a leaf demonstrating folding at the mid-rib vascular bundle and appearing V-shaped when viewed from the leaf tip to the stem. This change in morphology usually began to occur by about 2 days after the cessation of watering and was shown in earlier experiments to be associated with water loss of around 50% as measured by weight of pots prior to cessation of watering and weight of pots when the leaf curl morphology was observed in un-watered plants. Plants were considered to be under drought conditions, when the leaves showed wilting as evidenced by an inward curling (V-shape) of the leaf. This level of stress is considered to be a form of sub-lethal stress. Control leaf samples were taken from each plant for GUS testing prior to the induction of drought. Drought (indicated as “Des” in Table 5 below) was then induced and once each plant demonstrated drought induction as defined above, the plant was destroyed to acquire both root and leaf samples. GUS expression levels in the leaves were compared to the control tissue samples from the same plants prior to drought. For R₀ generation plants, fourteen plants for each vector were used. For F1 analysis, eight plants for each vector were used and GUS measures taken as described above. Four of the F1 plants were destroyed for tissue sampling for GUS assay (Des) after drought-induction. The other two F1 plants were allowed to recover and then destructively sampled to determine if the pattern of GUS expression under recovery was the same as that before drought was imposed.

[0122] In addition to drought, F1 germinating seedlings and F1 V3 stage plants transformed with the vectors presented in Table 2 were also exposed to conditions of cold to determine if the regulatory elements and chimeric regulatory elements demonstrated cold-induced expression of GUS. Sixty seeds, comprised of 6 seeds from each of 10 transformation events for each regulatory element or chimeric regulatory element, were tested for induction of gene expression under cold conditions. The seeds were germinated in petri plates on water saturated filter paper. Three days after germination, the seedlings were exposed to cold stress by placing the Petri dishes containing the germinated seedlings in a dark growth chamber set to 10 degrees Celsius for 24 hours. At the end of the 24 hour period, the root and coleoptiles tissues were sampled for quantitative GUS expression as described above. Whole plants were tested for induction of GUS expression under cold stress at V3 stage. Twenty V3 stage corn plants, comprised of 2 plants from each of 10 transformation events for each regulatory element or chimeric regulatory element, were exposed to a temperature of 12 degrees Celsius in a growth chamber for 24 hours. Plants in the growth chamber were grown under a white light fluence of 800 micro moles per meter squared per second with a light cycle of ten hours of white light and fourteen hours of darkness. After cold exposure, leaf and root tissues were sampled for quantitative GUS exposure as described above. Table 5 below shows the level of GUS expression in selected tissues in F1 plants transformed with pMON112215.

TABLE 5
F1 GUS expression in transgenic corn plants, transformed
with pMON112215.

| Stages | Organ | Inducer | Mean | SE |
|---|---|---|---|---|
| Imbibed seed | Embryo | — | 22.6 | 1.54 |
| Imbibed seed | Endosperm | — | 7.48 | 1.64 |
| 3 DAG | Root | — | 0 | 0 |
| V3 | Root main | Unstressed | 0 | 0 |
| V3 | Root crown | — | 0 | 0 |
| V3 | Root main | Cold | 0 | 0 |
| V3 | Root crown | — | 0 | 0 |
| V3 | Root main | Des | 0 | 0 |
| V3 | Root crown | — | nd | nd |
| V7 | Root seminal | — | 0 | 0 |
| V7 | Root crown | — | 0 | 0 |
| VT | Root seminal | — | 8.26 | 1.38 |
| 3 DAG | Coleoptile | — | 0 | 0 |
| V3 | Leaf | Unstressed | 0 | 0 |
| V3 | Leaf | Cold | 0 | 0 |
| V3 | Leaf | Des | 6.18 | 0.3 |
| V7 | Leaf - Mature | — | 0 | 0 |
| VT | Internode | — | 9.83 | 3.47 |
| VT | Cob | — | 7.38 | 1.78 |
| VT | Anther | — | 1060.86 | 849.27 |
| VT | Pollen | — | 200.74 | 101.84 |
| VT | Silk | — | 16.63 | 9.45 |
| 21 DAP | Embryo | — | 18.6 | 2.18 |
| 35 DAP | Embryo | — | 4.16 | 1.35 |
| 10 DAP | Kernal | — | 0 | 0 |
| 21 DAP | Endosperm | — | 11.14 | 0 |
| 35 DAP | Endosperm | — | 3.26 | 2.27 |

[0123] F1 corn plants, transformed with pMON112215 ((P-SETit.Rcc3-1:1:1 (SEQ ID NO: 88)+L-SETit.Rcc3-1:1:1 (SEQ ID NO: 161)) demonstrated high levels of expression in VT anther tissue. Expression in pollen was also observed to be higher than in tissues other than anther. Expression was observed to be around background levels in developing embryo and endosperm, VT silk, VT seminal root and VT internode. Using more sensitive assay methods such as ELISA of TIC809 expression, the SETit.Rcc3 promoter and leader has been shown previously to drive expression of a transgene in stably transformed, corn root tissues (WO 2009/126470).

### Example 3: Analysis of Regulatory Elements Driving GUS in Transgenic Corn

[0124] Corn root and leaf tissue from 12 to 13 day old seedlings is bombarded with plant GUS expression and control vectors to determine the capacity of transcriptional regulatory elements derived from Setaria italica to drive expression of a transgene, GUS.

[0125] Corn plant tissues were transformed with the plant GUS expression constructs, listed in Table 6, below. Regulatory elements presented in example 1 were cloned into a base plant expression vector using standard methods known in the art. The resulting plant expression vectors contained a right border region from Agrobacterium tumefaciens, a first transgene cassette to test the regulatory or chimeric regulatory element comprised of, a regulatory or chimeric regulatory element, operably linked to an intron derived from the HSP70 heat shock protein of Zea mays (I-Zm.DnaK-1:1:1, SEQ ID NO: 1102), operably linked to a coding sequence for β-glucuronidase (GUS) that possessed a processable intron (GUS-2, SEQ ID NO: 1091), operably linked to the 3′ termination region from the rice lipid transfer protein gene (T-Os.LTP-1:1:1, SEQ ID NO: 1089); a second transgene selection cassette used for selection of transformed plant cells that conferred resistance to the herbicide glyphosate (driven by the rice Actin 1 transcriptional regulatory element group, SEQ ID NO: 1098), and a left border region from A. tumefaciens. The resulting plasmids, pMON129227, pMON129228, pMON129229, pMON129230, pMON129231, pMON129232, pMON129233, pMON129234, pMON129235, pMON129236, pMON129237, pMON129238, pMON129239, pMON129240, pMON129241, pMON129242, pMON129243, pMON129244, pMON129245, pMON129246, pMON129247, pMON129248, pMON129249, pMON129250, pMON129251, pMON129252, pMON129253, pMON129254, pMON129255, pMON129256, pMON129257, pMON129258 and pMON129259 were used to transform corn plant tissue using particle bombardment.

TABLE 6
Binary Plant Transformation Vectors, Regulatory or chimeric regulatory
elements, GUS and 3' UTRs.

| Construct | Regulatory Elements | 3' UTR |
|---|---|---|
| pMON129227 | P-SETit.Cyp-1-1:1:1 (SEQ ID NO: 43) | T-Os.LTP- |
| | L-SETit.Cyp-1-1:1:1 (SEQ ID NO: 125) | 1:1:1 |
| pMON129228 | P-SETit.Cyp78a-1:1:2 (SEQ ID NO: 44) | T-Os.LTP- |
| | L-SETit.Cyp78a-1:1:1 (SEQ ID NO: 126) | 1:1:1 |
| pMON129229 | P-SETit.OMT2.1-1:1:2 (SEQ ID NO: 66) | T-Os.LTP- |
| | L-SETit.OMT2.1-1:1:1 (SEQ ID NO: 140) | 1:1:1 |
| pMON129230 | P-SETit.OMT2.2-1:1:2 (SEQ ID NO: 67) | T-Os.LTP- |
| | L-SETit.OMT2.2-1:1:2 (SEQ ID NO: 142) | 1:1:1 |
| pMON129231 | P-SETit.OMT2.3-1:1:1 (SEQ ID NO: 68) | T-Os.LTP- |
| | L-SETit.OMT2.2-1:1:1 (SEQ ID NO: 141) | 1:1:1 |
| pMON129232 | P-SETit.Grew2-1:1:1 (SEQ ID NO: 56) | T-Os.LTP- |
| | L-SETit.Grcw2-1:1:1 (SEQ ID NO: 134) | 1:1:1 |
| pMON129233 | P-SETit.Prx2-1:1:3 (SEQ ID NO: 81) | T-Os.LTP- |
| | L-SETit.Prx2-1:1:2 (SEQ ID NO: 155) | 1:1:1 |
| pMON129234 | P-SETit.Srp-1:1:2 (SEQ ID NO: 92) | T-Os.LTP- |
| | L-SETit.Srp-1:1:1 (SEQ ID NO: 163) | 1:1:1 |
| pMON129235 | P-SETit.LaDo-1:1:2 (SEQ ID NO: 62) | T-Os.LTP- |
| | L-SETit.LaDo-1:1:1 (SEQ ID NO: 137) | 1:1:1 |
| pMON129236 | P-SETit.Aip-1:1:1 (SEQ ID NO: 27) | T-Os.LTP- |
| | L-SETit.Aip-1:1:1 (SEQ ID NO: 109) | 1:1:1 |
| pMON129237 | P-SETit.Prx-1:1:1 (SEQ ID NO: 79) | T-Os.LTP- |
| | L-SETit.Prx-1:1:1 (SEQ ID NO: 153) | 1:1:1 |
| pMON129238 | P-SETit.Cb17-1:1:1 (SEQ ID NO: 34) | T-Os.LTP- |
| | L-SETit.Cb17-1:1:1 (SEQ ID NO: 115) | 1:1:1 |
| pMON129239 | P-SETit.Fst-1:1:1 (SEQ ID NO: 54) | T-Os.LTP- |
| | L-SETit.Fst-1:1:1 (SEQ ID NO: 132) | 1:1:1 |
| pMON129240 | P-SETit.Cda-1:1:1 (SEQ ID NO: 36) | T-Os.LTP- |
| | L-SETit.Cda-1:1:1 (SEQ ID NO: 117) | 1:1:1 |
| pMON129241 | P-SETit.Prx3-1:1:4 (SEQ ID NO: 83) | T-Os.LTP- |
| | L-SETit.Prx3-1:1:1 (SEQ ID NO: 156) | 1:1:1 |
| pMON129242 | P-SETit.Prx3-1:1:3 (SEQ ID NO: 82) | T-Os.LTP- |
| | L-SETit.Prx3-1:1:1 (SEQ ID NO: 156) | 1:1:1 |
| pMON129243 | P-SETit.Prx47-1:1:2 (SEQ ID NO: 84) | T-Os.LTP- |
| | L-SETit.Prx47-1:1:1 (SEQ ID NO: 157) | 1:1:1 |
| pMON129244 | P-SETit.Eie-1:1:1 (SEQ ID NO: 49) | T-Os.LTP- |
| | L-SETit.Eie-1:1:1 (SEQ ID NO: 129) | 1:1:1 |
| pMON129245 | P-SETit.Omt3-1:1:3 (SEQ ID NO: 69) | T-Os.LTP- |
| | L-SETit.Omt3-1:1:1 (SEQ ID NO: 143) | 1:1:1 |
| pMON129246 | P-SETit.Cys-1:1:2 (SEQ ID NO: 45) | T-Os.LTP- |
| | L-SETit.Cys-1:1:1 (SEQ ID NO: 127) | 1:1:1 |
| pMON129247 | P-SETit.Cys-1:1:3 (SEQ ID NO: 46) | T-Os.LTP- |
| | L-SETit.Cys-1:1:1 (SEQ ID NO: 127) | 1:1:1 |
| pMON129248 | P-SETit.Ucc1-1:1:2 (SEQ ID NO: 105) | T-Os.LTP- |
| | L-SETit.Ucc1-1:1:1 (SEQ ID NO: 170) | 1:1:1 |
| pMON129249 | P-SETit.Tip-1:1:4 (SEQ ID NO: 97) | T-Os.LTP- |
| | L-SETit.Tip-1:1:1 (SEQ ID NO: 165) | 1:1:1 |
| pMON129250 | P-SETit.Prx72-1:1:2 (SEQ ID NO: 85) | T-Os.LTP- |
| | L-SETit.Prx72-1:1:1 (SEQ ID NO: 158) | 1:1:1 |
| pMON129251 | P-SETit.Prx 17-1:1:2 (SEQ ID NO: 80) | T-Os.LTP- |
| | L-SETit.Prx17-1:1:1 (SEQ ID NO: 154) | 1:1:1 |
| pMON129252 | P-SETit.Mt1-1:1:2 (SEQ ID NO: 63) | T-Os.LTP- |
| | L-SETit.Mt1-1:1:1 (SEQ ID NO: 138) | 1:1:1 |
| pMON129253 | P-SETit.Ali1-1:1:3 (SEQ ID NO: 31) | T-Os.LTP- |
| | L-SETit.Ali1-1:1:1 (SEQ ID NO: 112) | 1:1:1 |
| pMON129254 | P-SETit.Rcc3-1:1:16 (SEQ ID NO: 91) | T-Os.LTP- |
| | L-SETit.Rcc3-1:1:2 (SEQ ID NO: 162) | 1:1:1 |
| pMON129255 | P-SETit.Pip2-3-1:1:1 (SEQ ID NO: 72) | T-Os.LTP- |
| | L-SETit.Pip2-3-1:1:1 (SEQ ID NO: 146) | 1:1:1 |
| pMON129256 | P-SETit.Tga6-1:1:2 (SEQ ID NO: 95) | T-Os.LTP- |
| | | 1:1:1 |
| pMON129257 | P-SETit.25509-1:1:3 (SEQ ID NO: 23) | T-Os.LTP- |
| | | 1:1:1 |
| pMON129258 | P-SETit.Grf-1:1:2 (SEQ ID NO: 57) | T-Os.LTP- |
| | | 1:1:1 |
| pMON129259 | P-SETit.Omt4_2-1:1:2 (SEQ ID NO: 70) | T-Os.LTP- |
| | L-SETit.Omt4_2-1:1:1 (SEQ ID NO: 144) | 1:1:1 |

[0126] The plant transformation vector, pMON129227 is comprised of the promoter element, P-SETit.Cyp-1-1:1:1 (SEQ ID NO: 43), operably linked 5′ to the leader element, L-SETit.Cyp-1-1:1:1 (SEQ ID NO: 125). The plant transformation vector, pMON129228 is comprised of the promoter element, P-SETit.Cyp78a-1:1:2 (SEQ ID NO: 44), operably linked 5′ to the leader element, L-SETit.Cyp78a-1:1:1 (SEQ ID NO: 126). The plant transformation vector, pMON129229 is comprised of the promoter element, P-SETit.OMT2.1-1:1:2 (SEQ ID NO: 66), operably linked 5′ to the leader element, L-SETit.OMT2.1-1:1:1 (SEQ ID NO: 140). The plant transformation vector, pMON129230 is comprised of the promoter element, P-SETit.OMT2.2-1:1:2 (SEQ ID NO: 67), operably linked 5′ to the leader element, L-SETit.OMT2.2-1:1:2 (SEQ ID NO: 142). The plant transformation vector, pMON129231 is comprised of the promoter element, P-SETit.OMT2.3-1:1:1 (SEQ ID NO: 68), operably linked 5′ to the leader element, L-SETit.OMT2.2-1:1:1 (SEQ ID NO: 141). The plant transformation vector, pMON129232 is comprised of the promoter element, P-SETit.Grcw2-1:1:1 (SEQ ID NO: 56), operably linked 5′ to the leader element, L-SETit.Grcw2-1:1:1 (SEQ ID NO: 134). The plant transformation vector, pMON129233 is comprised of the promoter element, P-SETit.Prx2-1:1:3 (SEQ ID NO: 81), operably linked 5′ to the leader element, L-SETit.Prx2-1:1:2 (SEQ ID NO: 155). The plant transformation vector, pMON129234 is comprised of the promoter element, P-SETit.Sip-1:1:2 (SEQ ID NO: 92), operably linked 5′ to the leader element, L-SETit.Srp-1:1:1 (SEQ ID NO: 163). The plant transformation vector, pMON129235 is comprised of the promoter element, P-SETit.LaDo-1:1:2 (SEQ ID NO: 62), operably linked 5′ to the leader element, L-SETit.LaDo-1:1:1 (SEQ ID NO: 137). The plant transformation vector, pMON129236 is comprised of the promoter element, P-SETit.Aip-1:1:1 (SEQ ID NO: 27), operably linked 5′ to the leader element, L-SETit.Aip-1:1:1 (SEQ ID NO: 109). The plant transformation vector, pMON129237 is comprised of the promoter element, P-SETit.Prx-1:1:1 (SEQ ID NO: 79), operably linked 5′ to the leader element, L-SETit.Prx-1:1:1 (SEQ ID NO: 153). The plant transformation vector, pMON129238 is comprised of the promoter element, P-SETit.Cb17-1:1:1 (SEQ ID NO: 34), operably linked 5′ to the leader element, L-SETit.Cb17-1:1:1 (SEQ ID NO: 115). The plant transformation vector, pMON129239 is comprised of the promoter element, P-SETit.Fst-1:1:1 (SEQ ID NO: 54), operably linked 5′ to the leader element, L-SETit.Fst-1:1:1 (SEQ ID NO: 132). The plant transformation vector, pMON129240 is comprised of the promoter element, P-SETit.Cda-1:1:1 (SEQ ID NO: 36), operably linked 5′ to the leader element, L-SETit.Cda-1:1:1 (SEQ ID NO: 117). The plant transformation vector, pMON129241 is comprised of the promoter element, P-SETit.Prx3-1:1:4 (SEQ ID NO: 83), operably linked 5′ to the leader element, L-SETit.Prx3-1:1:1 (SEQ ID NO: 156). The plant transformation vector, pMON129242 is comprised of the promoter element, P-SETit.Prx3-1:1:3 (SEQ ID NO: 82), operably linked 5′ to the leader element, L-SETit.Prx3-1:1:1 (SEQ ID NO: 156). The plant transformation vector, pMON129243 is comprised of the promoter element, P-SETit.Prx47-1:1:2 (SEQ ID NO: 84), operably linked 5′ to the leader element, L-SETit.Prx47-1:1:1 (SEQ ID NO: 157). The plant transformation vector, pMON129244 is comprised of the promoter element, P-SETit.Eie-1:1:1 (SEQ ID NO: 49), operably linked 5′ to the leader element, L-SETit.Eie-1:1:1 (SEQ ID NO: 129). The plant transformation vector, pMON129245 is comprised of the promoter element, P-SETit.Omt3-1:1:3 (SEQ ID NO: 69), operably linked 5′ to the leader element, L-SETit.Omt3-1:1:1 (SEQ ID NO: 143). The plant transformation vector, pMON129246 is comprised of the promoter element, P-SETit.Cys-1:1:2 (SEQ ID NO: 45), operably linked 5′ to the leader element, L-SETit.Cys-1:1:1 (SEQ ID NO: 127). The plant transformation vector, pMON129247 is comprised of the promoter element, P-SETit.Cys-1:1:3 (SEQ ID NO: 46), operably linked 5′ to the leader element, L-SETit.Cys-1:1:1 (SEQ ID NO: 127). The plant transformation vector, pMON129248 is comprised of the promoter element, P-SETit.Ucc1-1:1:2 (SEQ ID NO: 105), operably linked 5′ to the leader element, L-SETit.Ucc1-1:1:1 (SEQ ID NO: 170). The plant transformation vector, pMON129249 is comprised of the promoter element, P-SETit.Tip-1:1:4 (SEQ ID NO: 97), operably linked 5′ to the leader element, L-SETit.Tip-1:1:1 (SEQ ID NO: 165). The plant transformation vector, pMON129250 is comprised of the promoter element, P-SETit.Prx72-1:1:2 (SEQ ID NO: 85), operably linked 5′ to the leader element, L-SETit.Prx72-1:1:1 (SEQ ID NO: 158). The plant transformation vector, pMON129251 is comprised of the promoter element, P-SETit.Prx17-1:1:2 (SEQ ID NO: 80), operably linked 5′ to the leader element, L-SETit.Prx17-1:1:1 (SEQ ID NO: 154). The plant transformation vector, pMON129252 is comprised of the promoter element, P-SETit.Mt1-1:1:2 (SEQ ID NO: 63), operably linked 5′ to the leader element, L-SETit.Mt1-1:1:1 (SEQ ID NO: 138). The plant transformation vector, pMON129253 is comprised of the promoter element, P-SETit.Ali1-1:1:3 (SEQ ID NO: 31), operably linked 5′ to the leader element, L-SETit.Ali1-1:1:1 (SEQ ID NO: 112). The plant transformation vector, pMON129254 is comprised of the promoter element, P-SETit.Rcc3-1:1:16 (SEQ ID NO: 91), operably linked 5′ to the leader element, L-SETit.Rcc3-1:1:2 (SEQ ID NO: 162). The plant transformation vector, pMON129255 is comprised of the promoter element, P-SETit.Pip2-3-1:1:1 (SEQ ID NO: 72), operably linked 5′ to the leader element, L-SETit.Pip2-3-1:1:1 (SEQ ID NO: 146). The plant transformation vector, pMON129256 is comprised of the promoter element, P-SETit.Tga6-1:1:2 (SEQ ID NO: 95). The plant transformation vector, pMON129257 is comprised of the promoter element, P-SETit.25509-1:1:3 (SEQ ID NO: 23). The plant transformation vector, pMON129258 is comprised of the promoter element, P-SETit.Grf-1:1:2 (SEQ ID NO: 57). The plant transformation vector, pMON129259 is comprised of the promoter element, P-SETit.Omt4_2-1:1:2 (SEQ ID NO: 70), operably linked 5′ to the leader element, L-SETit.Omt4_2-1:1:1 (SEQ ID NO: 144).

[0127] Corn plant tissues were transformed with plant GUS expression constructs, pMON129227, pMON129228, pMON129229, pMON129230, pMON129231, pMON129232, pMON129233, pMON129234, pMON129235, pMON129236, pMON129237, pMON129238, pMON129239, pMON129240, pMON129241, pMON129242, pMON129243, pMON129244, pMON129245, pMON129246, pMON129247, pMON129248, pMON129249, pMON129250, pMON129251, pMON129252, pMON129253, pMON129254, pMON129255, pMON129256, pMON129257, pMON129258 and pMON129259, using particle bombardment.

[0128] Corn plant tissue was transformed using particle bombardment methods known to those skilled in the art with the vectors described above. Briefly, LH244 corn seeds are surface sterilized and allowed to germinate in trays with a photoperiod of 16 hours light and 8 hours of darkness. After 12 to 13 days, tissue is harvested under sterile conditions from the seedlings and used for bombardment. Approximately 10 leaf and 15 root explants are used for bombardment of each experimental construct. The tissue samples are randomly placed on a petri dish containing plant culture medium. Ten micrograms of plasmid DNA is used to coat 0.6 micron gold particles (Catalog #165-2262 Bio-Rad, Hercules, CA) for bombardment. Macro-carriers were loaded with the DNA-coated gold particles (Catalog #165-2335 Bio-Rad, Hercules CA). A PDS 1000/He biolistic gun was used for transformation (Catalog #165-2257 Bio-Rad, Hercules CA). The bombarded root and leaf tissues were allowed to incubate in the dark for 24 hours at 26 degrees Celsius. Following this overnight incubation, the tissues are stained in solution for GUS expression overnight at 37 degrees Celsius. After staining overnight, the tissues are soaked in 70% ethanol overnight to remove chlorophyll and reveal the GUS staining. The tissues were then photographed and a rating scale of “0” to “4” reflecting the level of GUS expression is assigned to each construct.

[0129] Four control plasmids were also used for bombardment designated, pMON19469, pMON59327, pMON30098 and pMON103758. The plasmid vectors, pMON19469, pMON59327, and pMON103758 contained known transcriptional regulatory elements driving GUS expression and were used as comparators for expression. The plasmid vector, pMON30098 was comprised of a transgene cassette used for the expression of green fluorescent protein and served as a negative control in the bombardment assay. The plasmid vector, pMON19469 is comprised of a transgene cassette comprised of the P-CaMV.35S-enh-1:1:9 promoter (SEQ ID NO: 1096), derived from the Cauliflower mosaic virus 35S promoter, operably linked 5′ to an intron derived from the HSP70 heat shock protein of Zea mays (I-Zm.DnaK-1:1:1, SEQ ID NO: 1102), operably linked to a coding sequence for β-glucuronidase (GUS-3, SEQ ID NO: 1092), operably linked 5′ to the Nopaline synthase 3′ termination region from A. tumefaciens (T-AGRtu.nos-1:1:13, SEQ ID NO: 1088). The plasmid vector, pMON59327 is comprised of a transgene cassette used for the expression of GUS which is comprised of the rice Rcc3 promoter (P-Os.Rcc3-1:1:24, SEQ ID NO: 1093) and leader (L-Os.Rcc3-1:1:1, SEQ ID NO: 1094), operably linked 5′ to an intron derived from the HSP70 heat shock protein of Zea mays (I-Zm.DnaK-1:1:1, SEQ ID NO: 1102), operably linked 5′ to a coding sequence for β-glucuronidase (GUS-3, SEQ ID NO: 1092), operably linked 5′ to the Nopaline synthase 3′ termination region from A. tumefaciens (T-AGRtu.nos-1:1:13, SEQ ID NO: 1088). The plasmid vector, pMON103758 is comprised of a transgene cassette used for the expression of GUS which is comprised of the rice Rcc3 promoter (P-Os.Rcc3-1:1:24, SEQ ID NO: 1093) and leader (L-Os.Rcc3-1:1:1, SEQ ID NO: 1094), operably linked 5′ to an intron derived from the HSP70 heat shock protein of Zea mays (I-Zm.DnaK-1:1:1, SEQ ID NO: 1102), operably linked 5′ to a coding sequence for β-glucuronidase (GUS-3, SEQ ID NO: 1092), operably linked 5′ to the Nopaline synthase 3′ termination region from A. tumefaciens (T-AGRtu.nos-1:1:13, SEQ ID NO: 1088). The plasmid vector, pMON30098 was comprised of a green fluorescent protein transgene cassette and served as a negative control in the bombardment assay and was comprised of a transgene cassette comprised of the transcriptional regulatory element group, EXP-CaMV.35S-enh (SEQ ID NO: 1095) which was further comprised of the promoter, P-CaMV.35S-enh-1:1:9 (SEQ ID NO: 1096), operably linked 5′ to the leader element, L-CaMV.35S-1:1:2 (SEQ ID NO: 1097), operably linked 5′ to an intron derived from the HSP70 heat shock protein of Zea mays (I-Zm.DnaK-1:1:1, SEQ ID NO: 1102), operably 5′ linked to a coding sequence for GFP (CR-Av.GFP.nno, SEQ ID NO: 1103), operably linked 5′ to the Nopaline synthase 3′ termination region from A. tumefaciens (T-AGRtu.nos-1:1:13, SEQ ID NO: 1088).

[0130] The average GUS expression ratings from the particle bombarded assay are shown in Table 7 below.

TABLE 7
Average GUS expression ratings for bombarded corn root and leaf
tissue transformed with listed plant GUS expression constructs.

| Construct | Regulatory Elements | Root | Leaf |
|---|---|---|---|
| pMON19469 | P-CaMV.35S-enh-1:1:9 promoter | 4 | 4 |
| | (SEQ ID NO: 1096) | | |
| pMON59327 | P-Os.Rcc3-1:1:24 (SEQ ID NO: 1093) | 4 | 0 |
| | L-Os.Rcc3-1:1:1 (SEQ ID NO: 1094) | | |
| pMON30098 | EXP-CaMV.35S-enh (SEQ ID NO: 1095) | 0 | 0 |
| (Neg.Control) | | | |
| pMON103758 | P-Os.Rcc3-1:1:24 (SEQ ID NO: 1093) | 3 | 0 |
| | L-Os.Rcc3-1:1:1 (SEQ ID NO: 1094) | | |
| pMON129227 | P-SETit.Cyp-1-1:1:1 (SEQ ID NO: 43) | 0 | 0 |
| | L-SETit.Cyp-1-1:1:1 (SEQ ID NO: 125) | | |
| pMON129228 | P-SETit.Cyp78a-1:1:2 (SEQ ID NO: 44) | 1 | 0 |
| | L-SETit.Cyp78a-1:1:1 (SEQ ID NO: 126) | | |
| pMON129229 | P-SETit.OMT2.1-1:1:2 (SEQ ID NO: 66) | 1 | 0 |
| | L-SETit.OMT2.1-1:1:1 (SEQ ID NO: 140) | | |
| pMON129230 | P-SETit.OMT2.2-1:1:2 (SEQ ID NO: 67) | 2 | 0 |
| | L-SETit.OMT2.2-1:1:2 (SEQ ID NO: 142) | | |
| pMON129231 | P-SETit.OMT2.3-1:1:1 (SEQ ID NO: 68) | 3 | 0 |
| | L-SETit.OMT2.2-1:1:1 (SEQ ID NO: 141) | | |
| pMON129232 | P-SETit.Grcw2-1:1:1 (SEQ ID NO: 56) | 2 | 0 |
| | L-SETit.Grcw2-1:1:1 (SEQ ID NO: 134) | | |
| pMON129233 | P-SETit.Prx2-1:1:3 (SEQ ID NO: 81) | 1 | 0 |
| | L-SETit.Prx2-1:1:2 (SEQ ID NO: 155) | | |
| pMON129234 | P-SETit.Srp-1:1:2 (SEQ ID NO: 92) | 3 | 0 |
| | L-SETit.Srp-1:1:1 (SEQ ID NO: 163) | | |
| pMON129235 | P-SETit.LaDo-1:1:2 (SEQ ID NO: 62) | 1 | 0 |
| | L-SETit.LaDo-1:1:1 (SEQ ID NO: 137) | | |
| pMON129236 | P-SETit.Aip-1:1:1 (SEQ ID NO: 27) | 2 | 0 |
| | L-SETit.Aip-1:1:1 (SEQ ID NO: 109) | | |
| pMON129237 | P-SETit.Prx-1:1:1 (SEQ ID NO: 79) | 3 | 1 |
| | L-SETit.Prx-1:1:1 (SEQ ID NO: 153) | | |
| pMON129238 | P-SETit.Cb17-1:1:1 (SEQ ID NO: 34) | 0 | 0 |
| | L-SETit.Cb17-1:1:1 (SEQ ID NO: 115) | | |
| pMON129239 | P-SETit.Fst-1:1:1 (SEQ ID NO: 54) | 0 | 0 |
| | L-SETit.Fst-1:1:1 (SEQ ID NO: 132) | | |
| pMON129240 | P-SETit.Cda-1:1:1 (SEQ ID NO: 36) | 0 | 0 |
| | L-SETit.Cda-1:1:1 (SEQ ID NO: 117) | | |
| pMON129241 | P-SETit.Prx3-1:1:4 (SEQ ID NO: 83) | 3 | 2 |
| | L-SETit.Prx3-1:1:1 (SEQ ID NO: 156) | | |
| pMON129242 | P-SETit.Prx3-1:1:3 (SEQ ID NO: 82) | 3 | 1 |
| | L-SETit.Prx3-1:1:1 (SEQ ID NO: 156) | | |
| pMON129243 | P-SETit.Prx47-1:1:2 (SEQ ID NO: 84) | 3 | 0 |
| | L-SETit.Prx47-1:1:1 (SEQ ID NO: 157) | | |
| pMON129244 | P-SETit.Eie-1:1:1 (SEQ ID NO: 49) | 1 | 0 |
| | L-SETit.Eie-1:1:1 (SEQ ID NO: 129) | | |
| pMON129245 | P-SETit.Omt3-1:1:3 (SEQ ID NO: 69) | 0 | 0 |
| | L-SETit.Omt3-1:1:1 (SEQ ID NO: 143) | | |
| pMON129246 | P-SETit.Cys-1:1:2 (SEQ ID NO: 45) | 2 | 0 |
| | L-SETit.Cys-1:1:1 (SEQ ID NO: 127) | | |
| pMON129247 | P-SETit.Cys-1:1:3 (SEQ ID NO: 46) | 3 | 0 |
| | L-SETit.Cys-1:1:1 (SEQ ID NO: 127) | | |
| pMON129248 | P-SETit.Ucc1-1:1:2 (SEQ ID NO: 105) | 3 | 1 |
| | L-SETit.Ucc1-1:1:1 (SEQ ID NO: 170) | | |
| pMON129249 | P-SETit.Tip-1:1:4 (SEQ ID NO: 97) | 3 | 1 |
| | L-SETit.Tip-1:1:1 (SEQ ID NO: 165) | | |
| pMON129250 | P-SETit.Prx72-1:1:2 (SEQ ID NO: 85) | 3 | 2 |
| | L-SETit.Prx72-1:1:1 (SEQ ID NO: 158) | | |
| pMON129251 | P-SETit.Prx 17-1:1:2 (SEQ ID NO: 80) | 0 | 0 |
| | L-SETit.Prx17-1:1:1 (SEQ ID NO: 154) | | |
| pMON129252 | P-SETit.Mt1-1:1:2 (SEQ ID NO: 63) | 2 | 0 |
| | L-SETit.Mt1-1:1:1 (SEQ ID NO: 138) | | |
| pMON129253 | P-SETit.Ali1-1:1:3 (SEQ ID NO: 31) | 2 | 0 |
| | L-SETit.Ali1-1:1:1 (SEQ ID NO: 112) | | |
| pMON129254 | P-SETit.Rcc3-1:1:16 (SEQ ID NO: 91) | 3 | 1 |
| | L-SETit.Rcc3-1:1:2 (SEQ ID NO: 162) | | |
| pMON129255 | P-SETit.Pip2-3-1:1:1 (SEQ ID NO: 72) | 3 | 0 |
| | L-SETit.Pip2-3-1:1:1 (SEQ ID NO: 146) | | |
| pMON129256 | P-SETit.Tga6-1:1:2 (SEQ ID NO: 95) | 0 | 0 |
| pMON129257 | P-SETit.25509-1:1:3 (SEQ ID NO: 23) | 0 | 0 |
| pMON129258 | P-SETit.Grf-1:1:2 (SEQ ID NO: 57) | 0 | 0 |
| pMON129259 | P-SETit.Omt4_2-1:1:2 (SEQ ID NO: 70) | 0 | 0 |
| | L-SETit.Omt4_2-1:1:1 (SEQ ID NO: 144) | | |

[0131] The highest average level of GUS expression for root tissues transformed by particicle bombardment were observed using the constructs, pMON129231 ((P-SETit.OMT2.3-1:1:1 (SEQ ID NO: 68)+L-SETit.OMT2.2-1:1:1 (SEQ ID NO: 141)); pMON129234 ((P-SETit.Srp-1:1:2 (SEQ ID NO: 92)+L-SETit.Srp-1:1:1 (SEQ ID NO: 163)); pMON129237

[0132] ((P-SETit.Prx-1:1:1 (SEQ ID NO: 79)+L-SETit.Prx-1:1:1 (SEQ ID NO: 153)); pMON129241 ((P-SETit.Prx3-1:1:4 (SEQ ID NO: 83)+L-SETit.Prx3-1:1:1 (SEQ ID NO: 156)); pMON129242 ((P-SETit.Prx3-1:1:3 (SEQ ID NO: 82)+L-SETit.Prx3-1:1:1 (SEQ ID NO: 156)); pMON129243 ((P-SETit.Prx47-1:1:2 (SEQ ID NO: 84)+L-SETit.Prx47-1:1:1 (SEQ ID NO: 157)); pMON129247 ((P-SETit.Cys-1:1:3 (SEQ ID NO: 46)+L-SETit.Cys-1:1:1 (SEQ ID NO: 127)); pMON129248 ((P-SETit.Ucc1-1:1:2 (SEQ ID NO: 105)+L-SETit.Ucc1-1:1:1 (SEQ ID NO: 170)); pMON129249 ((P-SETit.Tip-1:1:4 (SEQ ID NO: 97)+L-SETit.Tip-1:1:1 (SEQ ID NO: 165)); pMON129250 ((P-SETit.Prx72-1:1:2 (SEQ ID NO: 85)+L-SETit.Prx72-1:1:1 (SEQ ID NO: 158)); pMON129254 ((P-SETit.Rcc3-1:1:16 (SEQ ID NO: 91)+L-SETit.Rcc3-1:1:2 (SEQ ID NO: 162)) and pMON129255 ((P-SETit.Pip2-3-1:1:1 (SEQ ID NO: 72)+L-SETit.Pip2-3-1:1:1 (SEQ ID NO: 146)). Leaf expression was seen most highest in tissues bombarded with the constructs pMON129241 ((P-SETit.Prx3-1:1:4 (SEQ ID NO: 83)+L-SETit.Prx3-1:1:1 (SEQ ID NO: 156)) and pMON129250 ((P-SETit.Prx72-1:1:2 (SEQ ID NO: 85)+L-SETit.Prx72-1:1:1 (SEQ ID NO: 158)).

### Example 4: Analysis of Regulatory Elements Driving GUS in Transgenic Corn

[0133] Corn plants were transformed with plant expression vectors containing the test regulatory elements driving expression of the β-glucuronidase (GUS) transgene, and the resulting plants were analyzed for GUS protein expression.

[0134] Corn plants were transformed with the plant GUS expression constructs, listed in Table 8, below. Regulatory elements presented in Example 1 for monocot expression were cloned into a base plant expression vector using standard methods known in the art. The resulting plant expression vectors contained a right border region from Agrobacterium tumefaciens, a first transgene cassette to test the regulatory or chimeric regulatory element comprised of, a regulatory or chimeric regulatory element, operably linked to an intron derived from the HSP70 heat shock protein of Zea mays (I-Zm.DnaK-1:1:1, SEQ ID NO: 1102), operably linked to a coding sequence for β-glucuronidase (GUS) that possessed a processable intron (GUS-2, SEQ ID NO: 1091), operably linked to the 3′ termination region from the rice lipid transfer protein gene (T-Os.LTP-1:1:1, SEQ ID NO: 1089); a second transgene selection cassette used for selection of transformed plant cells that conferred resistance to the herbicide glyphosate (driven by the rice Actin 1 promoter, SEQ ID NO: 1098), and a left border region from A. tumefaciens. The resulting plasmids, pMON129227, pMON129228, pMON129229, pMON129230, pMON129231, pMON129232, pMON129233, pMON129234, pMON129235, pMON129236, pMON129237, pMON129238, pMON129239, pMON129240, pMON129241, pMON129242, pMON129243, pMON129244, pMON129245, pMON129246, pMON129247, pMON129249, pMON129250, pMON129251, pMON129252, pMON129253, pMON129254, pMON129255, pMON129256, pMON129257, pMON129258 and pMON129259 were used to transform corn plants.

TABLE 8
Binary Plant Transformation Vectors, Regulatory or chimeric regulatory
elements, GUS and 3' UTRs.

| Construct | Regulatory Elements | 3' UTR |
|---|---|---|
| pMON129227 | P-SETit.Cyp-1-1:1:1 (SEQ ID NO: 43) | T-Os.LTP-1:1:1 |
| | L-SETit.Cyp-1-1:1:1 (SEQ ID NO: 125) | |
| pMON129228 | P-SETit.Cyp78a-1:1:2 (SEQ ID NO: 44) | T-Os.LTP-1:1:1 |
| | L-SETit.Cyp78a-1:1:1 (SEQ ID NO: 126) | |
| pMON129229 | P-SETit.OMT2.1-1:1:2 (SEQ ID NO: 66) | T-Os.LTP-1:1:1 |
| | L-SETit.OMT2.1-1:1:1 (SEQ ID NO: 140) | |
| pMON129230 | P-SETit.OMT2.2-1:1:2 (SEQ ID NO: 67) | T-Os.LTP-1:1:1 |
| | L-SETit.OMT2.2-1:1:2 (SEQ ID NO: 142) | |
| pMON129231 | P-SETit.OMT2.3-1:1:1 (SEQ ID NO: 68) | T-Os.LTP-1:1:1 |
| | L-SETit.OMT2.2-1:1:1 (SEQ ID NO: 141) | |
| pMON129232 | P-SETit.Grcw2-1:1:1 (SEQ ID NO: 56) | T-Os.LTP-1:1:1 |
| | L-SETit.Grcw2-1:1:1 (SEQ ID NO: 134) | |
| pMON129233 | P-SETit.Prx2-1:1:3 (SEQ ID NO: 81) | T-Os.LTP-1:1:1 |
| | L-SETit.Prx2-1:1:2 (SEQ ID NO: 155) | |
| pMON129234 | P-SETit.Srp-1:1:2 (SEQ ID NO: 92) | T-Os.LTP-1:1:1 |
| | L-SETit.Srp-1:1:1 (SEQ ID NO: 163) | |
| pMON129235 | P-SETit.LaDo-1:1:2 (SEQ ID NO: 62) | T-Os.LTP-1:1:1 |
| | L-SETit.LaDo-1:1:1 (SEQ ID NO: 137) | |
| pMON129236 | P-SETit.Aip-1:1:1 (SEQ ID NO: 27) | T-Os.LTP-1:1:1 |
| | L-SETit.Aip-1:1:1 (SEQ ID NO: 109) | |
| pMON129237 | P-SETit.Prx-1:1:1 (SEQ ID NO: 79) | T-Os.LTP-1:1:1 |
| | L-SETit.Prx-1:1:1 (SEQ ID NO: 153) | |
| pMON129238 | P-SETit.Cb17-1:1:1 (SEQ ID NO: 34) | T-Os.LTP-1:1:1 |
| | L-SETit.Cb17-1:1:1 (SEQ ID NO: 115) | |
| pMON129239 | P-SETit.Fst-1:1:1 (SEQ ID NO: 54) | T-Os.LTP-1:1:1 |
| | L-SETit.Fst-1:1:1 (SEQ ID NO: 132) | |
| pMON129240 | P-SETit.Cda-1:1:1 (SEQ ID NO: 36) | T-Os.LTP-1:1:1 |
| | L-SETit.Cda-1:1:1 (SEQ ID NO: 117) | |
| pMON129241 | P-SETit.Prx3-1:1:4 (SEQ ID NO: 83) | T-Os.LTP-1:1:1 |
| | L-SETit.Prx3-1:1:1 (SEQ ID NO: 156) | |
| pMON129242 | P-SETit.Prx3-1:1:3 (SEQ ID NO: 82) | T-Os.LTP-1:1:1 |
| | L-SETit.Prx3-1:1:1 (SEQ ID NO: 156) | |
| pMON129243 | P-SETit.Prx47-1:1:2 (SEQ ID NO: 84) | T-Os.LTP-1:1:1 |
| | L-SETit.Prx47-1:1:1 (SEQ ID NO: 157) | |
| pMON129244 | P-SETit.Eie-1:1:1 (SEQ ID NO: 49) | T-Os.LTP-1:1:1 |
| | L-SETit.Eie-1:1:1 (SEQ ID NO: 129) | |
| pMON129245 | P-SETit.Omt3-1:1:3 (SEQ ID NO: 69) | T-Os.LTP-1:1:1 |
| | L-SETit.Omt3-1:1:1 (SEQ ID NO: 143) | |
| pMON129246 | P-SETit.Cys-1:1:2 (SEQ ID NO: 45) | T-Os.LTP-1:1:1 |
| | L-SETit.Cys-1:1:1 (SEQ ID NO: 127) | |
| pMON129247 | P-SETit.Cys-1:1:3 (SEQ ID NO: 46) | T-Os.LTP-1:1:1 |
| | L-SETit.Cys-1:1:1 (SEQ ID NO: 127) | |
| pMON129249 | P-SETit.Tip-1:1:4 (SEQ ID NO: 97) | T-Os.LTP-1:1:1 |
| | L-SETit.Tip-1:1:1 (SEQ ID NO: 165) | |
| pMON129250 | P-SETit.Prx72-1:1:2 (SEQ ID NO: 85) | T-Os.LTP-1:1:1 |
| | L-SETit.Prx72-1:1:1 (SEQ ID NO: 158) | |
| pMON129251 | P-SETit.Prx 17-1:1:2 (SEQ ID NO: 80) | T-Os.LTP-1:1:1 |
| | L-SETit.Prx 17-1:1:1 (SEQ ID NO: 154) | |
| pMON129252 | P-SETit.Mt1-1:1:2 (SEQ ID NO: 63) | T-Os.LTP-1:1:1 |
| | L-SETit.Mt1-1:1:1 (SEQ ID NO: 138) | |
| pMON129253 | P-SETit.Ali1-1:1:3 (SEQ ID NO: 31) | T-Os.LTP-1:1:1 |
| | L-SETit.Ali1-1:1:1 (SEQ ID NO: 112) | |
| pMON129254 | P-SETit.Rcc3-1:1:16 (SEQ ID NO: 91) | T-Os.LTP-1:1:1 |
| | L-SETit.Rcc3-1:1:2 (SEQ ID NO: 162) | |
| pMON129255 | P-SETit.Pip2-3-1:1:1 (SEQ ID NO: 72) | T-Os.LTP-1:1:1 |
| | L-SETit.Pip2-3-1:1:1 (SEQ ID NO: 146) | |
| pMON129256 | P-SETit.Tga6-1:1:2 (SEQ ID NO: 95) | T-Os.LTP-1:1:1 |
| pMON129257 | P-SETit.25509-1:1:3 (SEQ ID NO: 23) | T-Os.LTP-1:1:1 |
| pMON129258 | P-SETit.Grf-1:1:2 (SEQ ID NO: 57) | T-Os.LTP-1:1:1 |
| pMON129259 | P-SETit.Omt4_2-1:1:2 (SEQ ID NO: 70) | T-Os.LTP-1:1:1 |
| | L-SETit.Omt4_2-1:1:1 (SEQ ID NO: 144) | |

[0135] The plant transformation vector, pMON129227 is comprised of the promoter element, P-SETit.Cyp-1-1:1:1 (SEQ ID NO: 43), operably linked 5′ to the leader element, L-SETit.Cyp-1-1:1:1 (SEQ ID NO: 125). The plant transformation vector, pMON129228 is comprised of the promoter element, P-SETit.Cyp78a-1:1:2 (SEQ ID NO: 44), operably linked 5′ to the leader element, L-SETit.Cyp78a-1:1:1 (SEQ ID NO: 126). The plant transformation vector, pMON129229 is comprised of the promoter element, P-SETit.OMT2.1-1:1:2 (SEQ ID NO: 66), operably linked 5′ to the leader element, L-SETit.OMT2.1-1:1:1 (SEQ ID NO: 140). The plant transformation vector, pMON129230 is comprised of the promoter element, P-SETit.OMT2.2-1:1:2 (SEQ ID NO: 67), operably linked 5′ to the leader element, L-SETit.OMT2.2-1:1:2 (SEQ ID NO: 142). The plant transformation vector, pMON129231 is comprised of the promoter element, P-SETit.OMT2.3-1:1:1 (SEQ ID NO: 68), operably linked 5′ to the leader element, L-SETit.OMT2.2-1:1:1 (SEQ ID NO: 141). The plant transformation vector, pMON129232 is comprised of the promoter element, P-SETit.Grcw2-1:1:1 (SEQ ID NO: 56), operably linked 5′ to the leader element, L-SETit.Grcw2-1:1:1 (SEQ ID NO: 134). The plant transformation vector, pMON129233 is comprised of the promoter element, P-SETit.Prx2-1:1:3 (SEQ ID NO: 81), operably linked 5′ to the leader element, L-SETit.Prx2-1:1:2 (SEQ ID NO: 155). The plant transformation vector, pMON129234 is comprised of the promoter element, P-SETit.Srp-1:1:2 (SEQ ID NO: 92), operably linked 5′ to the leader element, L-SETit.Srp-1:1:1 (SEQ ID NO: 163). The plant transformation vector, pMON129235 is comprised of the promoter element, P-SETit.LaDo-1:1:2 (SEQ ID NO: 62), operably linked 5′ to the leader element, L-SETit.LaDo-1:1:1 (SEQ ID NO: 137). The plant transformation vector, pMON129236 is comprised of the promoter element, P-SETit.Aip-1:1:1 (SEQ ID NO: 27), operably linked 5′ to the leader element, L-SETit.Aip-1:1:1 (SEQ ID NO: 109). The plant transformation vector, pMON129237 is comprised of the promoter element, P-SETit.Prx-1:1:1 (SEQ ID NO: 79), operably linked 5′ to the leader element, L-SETit.Prx-1:1:1 (SEQ ID NO: 153). The plant transformation vector, pMON129238 is comprised of the promoter element, P-SETit.Cb17-1:1:1 (SEQ ID NO: 34), operably linked 5′ to the leader element, L-SETit.Cb17-1:1:1 (SEQ ID NO: 115). The plant transformation vector, pMON129239 is comprised of the promoter element, P-SETit.Fst-1:1:1 (SEQ ID NO: 54), operably linked 5′ to the leader element, L-SETit.Fst-1:1:1 (SEQ ID NO: 132). The plant transformation vector, pMON129240 is comprised of the promoter element, P-SETit.Cda-1:1:1 (SEQ ID NO: 36), operably linked 5′ to the leader element, L-SETit.Cda-1:1:1 (SEQ ID NO: 117). The plant transformation vector, pMON129241 is comprised of the promoter element, P-SETit.Prx3-1:1:4 (SEQ ID NO: 83), operably linked 5′ to the leader element, L-SETit.Prx3-1:1:1 (SEQ ID NO: 156). The plant transformation vector, pMON129242 is comprised of the promoter element, P-SETit.Prx3-1:1:3 (SEQ ID NO: 82), operably linked 5′ to the leader element, L-SETit.Prx3-1:1:1 (SEQ ID NO: 156). The plant transformation vector, pMON129243 is comprised of the promoter element, P-SETit.Prx47-1:1:2 (SEQ ID NO: 84), operably linked 5′ to the leader element, L-SETit.Prx47-1:1:1 (SEQ ID NO: 157). The plant transformation vector, pMON129244 is comprised of the promoter element, P-SETit.Eie-1:1:1 (SEQ ID NO: 49), operably linked 5′ to the leader element, L-SETit.Eie-1:1:1 (SEQ ID NO: 129). The plant transformation vector, pMON129245 is comprised of the promoter element, P-SETit.Omt3-1:1:3 (SEQ ID NO: 69), operably linked 5′ to the leader element, L-SETit.Omt3-1:1:1 (SEQ ID NO: 143). The plant transformation vector, pMON129246 is comprised of the promoter element, P-SETit.Cys-1:1:2 (SEQ ID NO: 45), operably linked 5′ to the leader element, L-SETit.Cys-1:1:1 (SEQ ID NO: 127). The plant transformation vector, pMON129247 is comprised of the promoter element, P-SETit.Cys-1:1:3 (SEQ ID NO: 46), operably linked 5′ to the leader element, L-SETit.Cys-1:1:1 (SEQ ID NO: 127). The plant transformation vector, pMON129249 is comprised of the promoter element, P-SETit.Tip-1:1:4 (SEQ ID NO: 97), operably linked 5′ to the leader element, L-SETit.Tip-1:1:1 (SEQ ID NO: 165). The plant transformation vector, pMON129250 is comprised of the promoter element, P-SETit.Prx72-1:1:2 (SEQ ID NO: 85), operably linked 5′ to the leader element, L-SETit.Prx72-1:1:1 (SEQ ID NO: 158). The plant transformation vector, pMON129251 is comprised of the promoter element, P-SETit.Prx17-1:1:2 (SEQ ID NO: 80), operably linked 5′ to the leader element, L-SETit.Prx17-1:1:1 (SEQ ID NO: 154). The plant transformation vector, pMON129252 is comprised of the promoter element, P-SETit.Mt1-1:1:2 (SEQ ID NO: 63), operably linked 5′ to the leader element, L-SETit.Mt1-1:1:1 (SEQ ID NO: 138). The plant transformation vector, pMON129253 is comprised of the promoter element, P-SETit.Ali1-1:1:3 (SEQ ID NO: 31), operably linked 5′ to the leader element, L-SETit.Ali1-1:1:1 (SEQ ID NO: 112). The plant transformation vector, pMON129254 is comprised of the promoter element, P-SETit.Rcc3-1:1:16 (SEQ ID NO: 91), operably linked 5′ to the leader element, L-SETit.Rcc3-1:1:2 (SEQ ID NO: 162). The plant transformation vector, pMON129255 is comprised of the promoter element, P-SETit.Pip2-3-1:1:1 (SEQ ID NO: 72), operably linked 5′ to the leader element, L-SETit.Pip2-3-1:1:1 (SEQ ID NO: 146). The plant transformation vector, pMON129256 is comprised of the promoter element, P-SETit.Tga6-1:1:2 (SEQ ID NO: 95). The plant transformation vector, pMON129257 is comprised of the promoter element, P-SETit.25509-1:1:3 (SEQ ID NO: 23). The plant transformation vector, pMON129258 is comprised of the promoter element, P-SETit.Grf-1:1:2 (SEQ ID NO: 57). The plant transformation vector, pMON129259 is comprised of the promoter element, P-SETit.Omt4_2-1:1:2 (SEQ ID NO: 70), operably linked 5′ to the leader element, L-SETit.Omt4_2-1:1:1 (SEQ ID NO: 144).

[0136] Corn plants were transformed with plant GUS expression constructs, pMON129227, pMON129228, pMON129229, pMON129230, pMON129231, pMON129232, pMON129233, pMON129234, pMON129235, pMON129236, pMON129237, pMON129238, pMON129239, pMON129240, pMON129241, pMON129242, pMON129243, pMON129244, pMON129245, pMON129246, pMON129247, pMON129249, pMON129250, pMON129251, pMON129252, pMON129253, pMON129254, pMON129255, pMON129256, pMON129257, pMON129258 and pMON129259.

[0137] Plants were transformed using Agrobacterium-mediated transformations and LH244 corn seed embryos as outlined in Example 2. Leaf and root tissue were harvested from 1 to 5 transformants and assayed for GUS expression. Histochemical GUS analysis was used for qualitative expression analysis of transformed plants. Whole tissue sections were incubated with GUS staining solution X-Gluc (5-bromo-4-chloro-3-indolyl-b-glucuronide) (1 milligram/milliliter) for an appropriate length of time, rinsed, and visually inspected for blue coloration. GUS activity was qualitatively determined by direct visual inspection or inspection under a microscope using selected plant organs and tissues. The R0 plants were inspected for expression in the roots and leaves.

[0138] For quantitative analysis, total protein was extracted from selected tissues of transformed corn plants. One microgram of total protein was used with the fluorogenic substrate 4-methylumbelliferyl-β-D-glucuronide (MUG) in a total reaction volume of 50 microliters. The reaction product, 4-methlyumbelliferone (4-MU), is maximally fluorescent at high pH, where the hydroxyl group is ionized. Addition of a basic solution of sodium carbonate simultaneously stops the assay and adjusts the pH for quantifying the fluorescent product. Fluorescence was measured with excitation at 365 nm, emission at 445 nm using a Fluoromax-3 with Micromax Reader, with slit width set at excitation 2 nm and emission 3 nm.

[0139] The average R₀ GUS expression for transgenic plants transformed with the constructs described in Table 8 are shown in Table 9 below.

TABLE 9
Average R0 GUS V3 Leaf and Root expression in transgenic corn plants, transformed
with listed constructs.

| | | V3 | V3 |
|---|---|---|---|
| Construct | Regulatory Elements | Root | Leaf |
| pMON129227 | P-SETit.Cyp-1-1:1:1 (SEQ ID NO: 43) | 0.00 | 0.00 |
| | L-SETit.Cyp-1-1:1:1 (SEQ ID NO: 125) | | |
| pMON129228 | P-SETit.Cyp78a-1:1:2 (SEQ ID NO: 44) | 7.91 | 0.00 |
| | L-SETit.Cyp78a-1:1:1 (SEQ ID NO: 126) | | |
| pMON129229 | P-SETit.OMT2.1-1:1:2 (SEQ ID NO: 66) | 0.00 | 0.00 |
| | L-SETit.OMT2.1-1:1:1 (SEQ ID NO: 140) | | |
| pMON129230 | P-SETit.OMT2.2-1:1:2 (SEQ ID NO: 67) | 0.00 | 0.00 |
| | L-SETit.OMT2.2-1:1:2 (SEQ ID NO: 142) | | |
| pMON129231 | P-SETit.OMT2.3-1:1:1 (SEQ ID NO: 68) | 0.00 | 0.00 |
| | L-SETit.OMT2.2-1:1:1 (SEQ ID NO: 141) | | |
| pMON129232 | P-SETit.Grcw2-1:1:1 (SEQ ID NO: 56) | 0.00 | 0.00 |
| | L-SETit.Grew2-1:1:1 (SEQ ID NO: 134) | | |
| pMON129233 | P-SETit.Prx2-1:1:3 (SEQ ID NO: 81) | 5.96 | nd |
| | L-SETit.Prx2-1:1:2 (SEQ ID NO: 155) | | |
| pMON129234 | P-SETit.Srp-1:1:2 (SEQ ID NO: 92) | 0.00 | 0.00 |
| | L-SETit.Srp-1:1:1 (SEQ ID NO: 163) | | |
| pMON129235 | P-SETit.LaDo-1:1:2 (SEQ ID NO: 62) | 0.00 | 0.00 |
| | L-SETit.LaDo-1:1:1 (SEQ ID NO: 137) | | |
| pMON129236 | P-SETit.Aip-1:1:1 (SEQ ID NO: 27) | 0.00 | 0.00 |
| | L-SETit.Aip-1:1:1 (SEQ ID NO: 109) | | |
| pMON129237 | P-SETit.Prx-1:1:1 (SEQ ID NO: 79) | 10.66 | 0.00 |
| | L-SETit.Prx-1:1:1 (SEQ ID NO: 153) | | |
| pMON129238 | P-SETit.Cb17-1:1:1 (SEQ ID NO: 34) | 0.00 | 0.00 |
| | L-SETit.Cb17-1:1:1 (SEQ ID NO: 115) | | |
| pMON129239 | P-SETit.Fst-1:1:1 (SEQ ID NO: 54) | 2.86 | 0.00 |
| | L-SETit.Fst-1:1:1 (SEQ ID NO: 132) | | |
| pMON129240 | P-SETit.Cda-1:1:1 (SEQ ID NO: 36) | 0.00 | 0.00 |
| | L-SETit.Cda-1:1:1 (SEQ ID NO: 117) | | |
| pMON129241 | P-SETit.Prx3-1:1:4 (SEQ ID NO: 83) | 7.49 | 0.00 |
| | L-SETit.Prx3-1:1:1 (SEQ ID NO: 156) | | |
| pMON129242 | P-SETit.Prx3-1:1:3 (SEQ ID NO: 82) | 1.90 | 0.00 |
| | L-SETit.Prx3-1:1:1 (SEQ ID NO: 156) | | |
| pMON129243 | P-SETit.Prx47-1:1:2 (SEQ ID NO: 84) | 9.26 | 0.00 |
| | L-SETit.Prx47-1:1:1 (SEQ ID NO: 157) | | |
| pMON129244 | P-SETit.Eie-1:1:1 (SEQ ID NO: 49) | 2.35 | 0.00 |
| | L-SETit.Eie-1:1:1 (SEQ ID NO: 129) | | |
| pMON129245 | P-SETit.Omt3-1:1:3 (SEQ ID NO: 69) | 0.00 | 0.00 |
| | L-SETit.Omt3-1:1:1 (SEQ ID NO: 143) | | |
| pMON129246 | P-SETit.Cys-1:1:2 (SEQ ID NO: 45) | 0.00 | 0.00 |
| | L-SETit.Cys-1:1:1 (SEQ ID NO: 127) | | |
| pMON129247 | P-SETit.Cys-1:1:3 (SEQ ID NO: 46) | 0.00 | 0.00 |
| | L-SETit.Cys-1:1:1 (SEQ ID NO: 127) | | |
| pMON129249 | P-SETit.Tip-1:1:4 (SEQ ID NO: 97) | 34.79 | 0.00 |
| | L-SETit.Tip-1:1:1 (SEQ ID NO: 165) | | |
| pMON129250 | P-SETit.Prx72-1:1:2 (SEQ ID NO: 85) | 0.00 | 0.00 |
| | L-SETit.Prx72-1:1:1 (SEQ ID NO: 158) | | |
| pMON129251 | P-SETit.Prx17-1:1:2 (SEQ ID NO: 80) | 0.00 | 0.00 |
| | L-SETit.Prx 17-1:1:1 (SEQ ID NO: 154) | | |
| pMON129252 | P-SETit.Mt1-1:1:2 (SEQ ID NO: 63) | 0.00 | 24.92 |
| | L-SETit.Mt1-1:1:1 (SEQ ID NO: 138) | | |
| pMON129253 | P-SETit.Ali1-1:1:3 (SEQ ID NO: 31) | 0.00 | 11.58 |
| | L-SETit.Ali1-1:1:1 (SEQ ID NO: 112) | | |
| pMON129254 | P-SETit.Rcc3-1:1:16 (SEQ ID NO: 91) | 9.39 | 0.00 |
| | L-SETit.Rcc3-1:1:2 (SEQ ID NO: 162) | | |
| pMON129255 | P-SETit.Pip2-3-1:1:1 (SEQ ID NO: 72) | 79.81 | 0.00 |
| | L-SETit.Pip2-3-1:1:1 (SEQ ID NO: 146) | | |
| pMON129256 | P-SETit.Tga6-1:1:2 (SEQ ID NO: 95) | 6.91 | 0.00 |
| pMON129257 | P-SETit.25509-1:1:3 (SEQ ID NO: 23) | 0.00 | 0.00 |
| pMON129258 | P-SETit.Grf-1:1:2 (SEQ ID NO: 57) | 0.00 | 0.00 |
| pMON129259 | P-SETit.Omt4_2-1:1:2 (SEQ ID NO: 70) | 0.00 | 0.00 |
| | L-SETit.Omt4_2-1:1:1 (SEQ ID NO: 144) | | |

[0140] The highest average levels of GUS expression in the roots of V3 stage plants was observed in plants transformed with the constructs pMON129255 ((P-SETit.Pip2-3-1:1:1 (SEQ ID NO: 72)+L-SETit.Pip2-3-1:1:1 (SEQ ID NO: 146)) and pMON129249 ((P-SETit.Tip-1:1:4 (SEQ ID NO: 97)+L-SETit.Tip-1:1:1 (SEQ ID NO: 165)).

### Example 5: Analysis of Actin and Tubulin Regulatory Elements Driving GUS in Corn Protoplasts

[0141] Corn leaf protoplasts are transformed with plant expression vectors containing a test transcriptional regulatory element or transcriptional regulatory expression element group, driving expression of the β-glucuronidase (GUS) transgene, and compared to leaf protoplast in which expression of GUS is driven by known constitutive promoters.

[0142] Corn protoplast cells, derived from leaf tissue are transformed using methods known in the art with plant expression vectors to compare expression of a transgene driven by the transcriptional regulatory expression element groups, EXP-SETit.TubA3:1:3 (SEQ ID NO: 19), EXP-SETit.TubA2:1:3 (SEQ ID NO: 16), EXP-SETit.TubA2-2:1:1 (SEQ ID NO: 18), EXP-SETit.Act8:1:1 (SEQ ID NO: 9), EXP-SETit.Act8:1:2 (SEQ ID NO: 10), EXP-SETit.Act8:c (SEQ ID NO: 11), EXP-SETit.TubA2-1:1:2 (SEQ ID NO: 17) and EXP-SETit.TubA2:1:1 (SEQ ID NO: 15) with that of known constitutive promoters. Each transcriptional regulatory expression element group is cloned using methods known in the art into a plant expression vector shown in Table 10 below. The resulting plant expression vectors are comprised of a transgene cassette comprised of a transcriptional regulatory expression element group, operably linked 5′ to a coding sequence for β-glucuronidase (GUS) (GUS-1 or GUS-3, represented by SEQ ID NOS: 1090 and 1092, respectively), which is operably linked 5′ to a 3′ termination region derived from the A. tumefaciens Nopaline synthase gene (T-AGRtu.nos-1:1:13, SEQ ID NO: 1088) or the wheat Hsp17 gene (T-Ta.Hsp17-1:1:1, SEQ ID NO: 1108).

[0143] Control plasmids used for comparison are constructed as described above and are comprised of a known constitutive, transcriptional regulatory expression element groups. The control plasmid vector, pMON19469 is comprised of the transcriptional regulatory element group, EXP-CaMV.35S-enh/I-Zm.DnaK-1:1:1 (SEQ ID NO: 1104). The control plasmid vector, pMON65328 is comprised of the transcriptional regulatory element group, EXP-CaMV.35S-enh-Lhcb1/I-Os.Act1-1:1:9 (SEQ ID NO: 1105). The control plasmid vector, pMON25455 is comprised of the transcriptional regulatory element group, EXP-Os.Act1:1:1 (SEQ ID NO: 1098). The control plasmid vector, pMON122605 is comprised of the transcriptional regulatory element group, EXP-Os.TubA-3:1:1 (SEQ ID NO: 1107). Each control vector transcriptional regulatory element group is operably linked 5′ to a coding sequence for β-glucuronidase (GUS) (GUS-1 or GUS-3, represented by SEQ ID NOS: 1090 and 1092, respectively), which is operably linked 5′ to a 3′ termination region derived from the A. tumefaciens Nopaline synthase gene (T-AGRtu.nos-1:1:13, SEQ ID NO: 1088) or the wheat Hsp17 gene (T-Ta.Hsp17-1:1:1, SEQ ID NO: 1108). In addition, three controls are provided as controls for background GUS and luciferase expression, a no DNA control, an empty vector which is not designed for transgene expression and an expression vector used to express green fluorescent protein (GFP).

TABLE 10
GUS plant expression vectors and corresponding transcriptional regulatory
expression element groups and constituent promoters, leaders and introns,
and 3' UTR used for transformation of corn leaf protoplasts.

| Construct | Regulatory Elements | 3' UTR |
|---|---|---|
| pMON136270 | EXP-SETit.TubA3:1:3 (SEQ ID NO: 19) | T-AGRtu.nos-1:1:13 |
| | P-SETit.TubA3-1:1:3 (SEQ ID NO: 101) | |
| | L-SETit.TubA3-1:1:1 (SEQ ID NO: 168) | |
| pMON136272 | EXP-SETit.TubA2:1:3 (SEQ ID NO: 16) | T-AGRtu.nos-1:1:13 |
| | P-SETit.TubA2-1-1:1:3 (SEQ ID NO: 99) | |
| | L-SETit.TubA2-1-1:1:1 (SEQ ID NO: 166) | |
| | I-SETit.TubA2_1-1:1:2 (SEQ ID NO: 176) | |
| pMON136275 | EXP-SETit.TubA2-2:1:1 (SEQ ID NO: 18) | T-AGRtu.nos-1:1:13 |
| | P-SETit.TubA2-2-1:1:3 (SEQ ID NO: 100) | |
| | L-SETit.TubA2-2-1:1:1 (SEQ ID NO: 167) | |
| pMON136276 | EXP-SETit.Act8:1:1 (SEQ ID NO: 9) | T-AGRtu.nos-1:1:13 |
| | P-SETit.Act8-1:1:5 (SEQ ID NO: 24) | |
| | L-SETit.Act8-1:1:2 (SEQ ID NO: 106) | |
| | I-SETit.Act8-1:1:2 (SEQ ID NO: 172) | |
| | L-SETit.Act8-1:1:3 (SEQ ID NO: 107) | |
| pMON136277 | EXP-SETit.Act8:1:2 (SEQ ID NO: 10) | T-AGRtu.nos-1:1:13 |
| | P-SETit.Act8-1:1:6 (SEQ ID NO: 25) | |
| | L-SETit.Act8-1:1:2 (SEQ ID NO: 106) | |
| | I-SETit.Act8-1:1:2 (SEQ ID NO: 172) | |
| | L-SETit.Act8-1:1:3 (SEQ ID NO: 107) | |
| pMON136278 | EXP-SETit.Act8:c (SEQ ID NO: 11) | T-AGRtu.nos-1:1:13 |
| | P-SETit.Act8-1-1:1:2 (SEQ ID NO: 26) | |
| | L-SETit.Act8-1:1:4 (SEQ ID NO: 108) | |
| | I-SETit.Act8-1:1:2 (SEQ ID NO: 172) | |
| | L-SETit.Act8-1:1:3 (SEQ ID NO: 107) | |
| pMON136279 | EXP-SETit.TubA2-1:1:2 (SEQ ID NO: 17) | T-AGRtu.nos-1:1:13 |
| | P-SETit.TubA2-1-1:1:2 (SEQ ID NO: 98) | |
| | L-SETit.TubA2-1-1:1:1 (SEQ ID NO: 166) | |
| pMON136280 | EXP-SETit.TubA2:1:1 (SEQ ID NO: 15) | T-AGRtu.nos-1:1:13 |
| | P-SETit.TubA2-1-1:1:2 (SEQ ID NO: 98) | |
| | L-SETit.TubA2-1-1:1:1 (SEQ ID NO: 166) | |
| | I-SETit.TubA2_1-1:1:2 (SEQ ID NO: 176) | |

[0144] The plant transformation vector, pMON136270 is comprised of the transcriptional regulatory element group, EXP-SETit.TubA3:1:3 (SEQ ID NO: 19), which is further comprised of the promoter element, P-SETit.TubA3-1:1:3 (SEQ ID NO: 101), operably linked 5′ to the leader element, L-SETit.TubA3-1:1:1 (SEQ ID NO: 168). The plant transformation vector, pMON136272 is comprised of the transcriptional regulatory element group, EXP-SETit.TubA2:1:3 (SEQ ID NO: 16), which is further comprised of the promoter element, P-SETit.TubA2-1-1:1:3 (SEQ ID NO: 99), operably linked 5′ to the leader element, L-SETit.TubA2-1-1:1:1 (SEQ ID NO: 166), operably linked 5′ to the intron element, I-SETit.TubA2_1-1:1:2 (SEQ ID NO: 176). The plant transformation vector, pMON136275 is comprised of the transcriptional regulatory element group, EXP-SETit.TubA2-2:1:1 (SEQ ID NO: 18), which is further comprised of the promoter element, P-SETit.TubA2-2-1:1:3 (SEQ ID NO: 100), operably linked 5′ to the leader element, L-SETit.TubA2-2-1:1:1 (SEQ ID NO: 167). The plant transformation vector, pMON136276 is comprised of the transcriptional regulatory element group, EXP-SETit.Act8:1:1 (SEQ ID NO: 9), which is further comprised of the promoter element, P-SETit.Act8-1:1:5 (SEQ ID NO: 24), operably linked 5′ to the leader element, L-SETit.Act8-1:1:2 (SEQ ID NO: 106), operably linked 5′ to the intron element, I-SETit.Act8-1:1:2 (SEQ ID NO: 172), operably linked 5′ to the leader element, L-SETit.Act8-1:1:3 (SEQ ID NO: 107). The plant transformation vector, pMON136277 is comprised of the transcriptional regulatory element group, EXP-SETit.Act8:1:2 (SEQ ID NO: 10), which is further comprised of the promoter element, P-SETit.Act8-1:1:6 (SEQ ID NO: 25), operably linked 5′ to the leader element, L-SETit.Act8-1:1:2 (SEQ ID NO: 106), operably linked 5′ to the intron element, I-SETit.Act8-1:1:2 (SEQ ID NO: 172), operably linked 5′ to the leader element, L-SETit.Act8-1:1:3 (SEQ ID NO: 107). The plant transformation vector, pMON136278 is comprised of the transcriptional regulatory element group, EXP-SETit.Act8:c (SEQ ID NO: 11), which is further comprised of the promoter element, P-SETit.Act8-1-1:1:2 (SEQ ID NO: 26), operably linked 5′ to the leader element, L-SETit.Act8-1:1:4 (SEQ ID NO: 108), operably linked 5′ to the intron element, I-SETit.Act8-1:1:2 (SEQ ID NO: 172), operably linked 5′ to the leader element, L-SETit.Act8-1:1:3 (SEQ ID NO: 107). The plant transformation vector, pMON136279 is comprised of the transcriptional regulatory element group, EXP-SETit.TubA2-1:1:2 (SEQ ID NO: 17), which is further comprised of the promoter element, P-SETit.TubA2-1-1:1:2 (SEQ ID NO: 98), operably linked 5′ to the leader element, L-SETit.TubA2-1-1:1:1 (SEQ ID NO: 166). The plant transformation vector, pMON136280 is comprised of the transcriptional regulatory element group, EXP-SETit.TubA2:1:1 (SEQ ID NO: 15), which is further comprised of the promoter element, P-SETit.TubA2-1-1:1:2 (SEQ ID NO: 98), operably linked 5′ to the leader element, L-SETit.TubA2-1-1:1:1 (SEQ ID NO: 166), operably linked 5′ to the intron element, I-SETit.TubA2_1-1:1:2 (SEQ ID NO: 176).

[0145] Two plasmids, for use in co-transformation and normalization of data, are also constructed using methods known in the art. Each plasmid contains a specific luciferase coding sequence which is driven by a constitutive transcriptional regulatory expression element group. The plant vector, pMON19437 is comprised of a transgene cassette comprised of a constitutive promoter (EXP-CaMV.35S-enh, SEQ ID NO: 1095), operably linked 5′ to an intron, (I-Zm.DnaK-1:1:1, SEQ ID NO: 1102), operably linked 5′ to a firefly (Photinus pyralis) luciferase coding sequence (LUCIFERASE:1:3, SEQ ID NO: 1109), operably linked 5′ to a 3′ termination region from the Agrobacterium tumefaciens nopaline synthase gene (T-AGRtu.nos-1:1:13, SEQ ID NO: 1088). The plant vector, pMON63934 is comprised of a transgene cassette comprised of a constitutive transcriptional regulatory expression element group, (EXP-CaMV.35S-enh-Lhcb1, SEQ ID NO: 1106), operably linked 5′ to a sea pansy (Renilla reniformis) luciferase coding sequence (CR-Ren.hRenilla Lucife-0:0:1, SEQ ID NO: 1110), operably linked 5′ to a 3′ termination region from the Agrobacterium tumefaciens nopaline synthase gene (T-AGRtu.nos-1:1:13, SEQ ID NO: 1088).

[0146] Corn leaf protoplasts are transformed using a PEG-based transformation method, similar to those known in the art. Protoplast cells are transformed with a DNA prep comprised of equimolar quantities of the two luciferase expression plasmids, pMON19437 and pMON63934 and one of the test plasmids and incubated overnight in total darkness. After incubation, the cells are rinsed, resuspended and lysed. Measurements of both GUS and luciferase are conducted using aliquots of each lysis preparation. Essentially, the collected, transformed protoplast cells are lysed in 5× passive lysis buffer (Promega). After allowing for lysis, aliquots of the lysed preparation are placed into two different small-well trays. One tray is used for GUS measurements. For quantitative analysis of GUS expression, total protein is extracted from lysis preparation. One microgram of total protein is used with the fluorogenic substrate 4-methyleumbelliferyl-β-D-glucuronide (MUG) in a total reaction volume of 50 microliters. The reaction product, 4-methlyumbelliferone (4-MU), is maximally fluorescent at high pH, where the hydroxyl group is ionized. Addition of a basic solution of sodium carbonate simultaneously stops the assay and adjusts the pH for quantifying the fluorescent product. Fluorescence is measured with excitation at 365 nm, emission at 445 nm using a Fluoromax-3 with Micromax Reader, with slit width set at excitation 2 nm and emission 3 nm. GUS values are expressed as pmol of 4-MU protein per minute per milligram protein (pmol 4-MU min⁻¹ mg⁻¹ protein).

[0147] The second tray is used to perform a dual luciferase assay using the dual luciferase reporter assay system (Promega, Madison, WI). All luciferase detection reagents are prepared as described by the manufacturer and assays conducted following the manufacturer's protocol (See for example, Promega Notes Magazine, No: 57, 1996, p. 02). Firefly luciferase reagent (LARII) is added to each sample and assay of the firefly luciferase activity recorded. Upon completion of the firefly luciferase assay, the firefly luminescence is quenched and luminescence of the Renilla reniformis luciferase simultaneously activated by adding Stop & Glo™ reagent to the sample. Measurement of the Renilla reniformis luciferase activity is recorded following activation of the Renilla luciferase. One or two transformations for each transcriptional regulatory expression element group are performed and the mean expression values for each transcriptional regulatory expression element group determined from several samples from each transformation experiment. Sample measurements are made using four replicates of each test transcriptional regulatory expression element group construct transformation, or alternatively, three replicates of each test transcriptional regulatory expression element group construct per one of two transformation experiments. The mean GUS and luciferase expression levels are provided in Tables 11 and 12. The firefly luciferase values are provided in the column labeled “Fluc” and the Renilla luciferase values are provided as in the column labeled “Rluc”.

[0148] To compare the relative activity of each transcriptional regulatory expression element group, GUS values are expressed as a ratio of the mean GUS expression to the mean luciferase activity and normalized with respect to the expression levels observed for the transcriptional regulatory expression element groups EXP-Os.Act1:1:1 (SEQ ID NO: 1098) and EXP-Os.TubA-3:1:1 (SEQ ID NO: 1107). Table 11 below shows the mean GUS/Rluc ratios normalized with respect to EXP-Os.Act1:1: and EXP-Os.TubA-3:1:1 expression in corn protoplasts.

TABLE 11
Mean GUS/Rluc fold expression relative to EXP-Os.TubA-3:1:1expression in
corn leaf protoplast cells.

| | | | Mean Gus/Rluc | Mean Gus/Rluc |
|---|---|---|---|---|
| | Transcriptional | | Normalized with | Normalized with |
| | Regulatory Element | Mean | respect to EXP- | respect to EXP- |
| Construct | Group | Gus/RLuc | Os.TubA-3:1:1 | Os.Act1:1:1 |
| pMON19469 | EXP-CaMV.35S-enh/ | 2.640 | 2.718 | 1.054 |
| | I-Zm.DnaK-1:1:1 | | | |
| | (SEQ ID NO: 1102) | | | |
| pMON65328 | EXP-CaMV.35S-enh- | 3.213 | 3.307 | 1.283 |
| | Lhcb1/I-Os.Act1- | | | |
| | 1:1:9 (SEQ ID NO: 1105) | | | |
| pMON25455 | EXP-Os.Act1:1:1 | 2.504 | 2.578 | 1.000 |
| | (SEQ ID NO: 1098) | | | |
| pMON122605 | EXP-Os.TubA-3:1:1 | 0.971 | 1.000 | 0.388 |
| | (SEQ ID NO: 1107) | | | |
| pMON136270 | EXP-SETit.TubA3:1:3 | 1.909 | 1.965 | 0.762 |
| | (SEQ ID NO: 19) | | | |
| pMON136272 | EXP-SETit.TubA2:1:3 | 0.144 | 0.148 | 0.057 |
| | (SEQ ID NO: 16) | | | |
| pMON136275 | EXP-SETit.TubA2- | 0.001 | 0.001 | 0.000 |
| | 2:1:1 (SEQ ID NO: 18) | | | |
| pMON136276 | EXP-SETit.Act8:1:1 | 0.353 | 0.364 | 0.141 |
| | (SEQ ID NO: 9) | | | |
| pMON136277 | EXP-SETit.Act8:1:2 | 0.271 | 0.279 | 0.108 |
| | (SEQ ID NO: 10) | | | |
| pMON136278 | EXP-SETit.Act8:c | 0.005 | 0.005 | 0.002 |
| | (SEQ ID NO: 11) | | | |
| pMON136279 | EXP-SETit.TubA2- | 0.003 | 0.004 | 0.001 |
| | 1:1:2 (SEQ ID NO: 17) | | | |
| pMON136280 | EXP-SETit.TubA2:1:1 | 0.155 | 0.159 | 0.062 |
| | (SEQ ID NO: 15) | | | |

TABLE 12
Mean GUS/Fluc fold expression relative to EXP-Os.TubA-3:1:1expression in
corn leaf protoplast cells.

| | | | Gus/Fluc | Gus/Fluc |
|---|---|---|---|---|
| | Transcriptional | | Normlized with | Normlized with |
| | Regulatory Element | Mean | respect to EXP- | respect to EXP- |
| Construct | Group | Gus/FLuc | Os.TubA-3:1:1 | Os.Act1:1:1 |
| pMON19469 | EXP-CaMV.35S-enh/ | 21.580 | 18.072 | 2.521 |
| | I-Zm.DnaK-1:1:1 | | | |
| | (SEQ ID NO: 1102) | | | |
| pMON65328 | EXP-CaMV.35S-enh- | 29.566 | 24.759 | 3.454 |
| | Lhcb1/I-Os.Act1- | | | |
| | 1:1:9 (SEQ ID NO: 1105) | | | |
| pMON25455 | EXP-Os.Act1:1:1 | 8.559 | 7.167 | 1.000 |
| | (SEQ ID NO: 1098) | | | |
| pMON122605 | EXP-Os.TubA-3:1:1 | 1.194 | 1.000 | 0.140 |
| | (SEQ ID NO: 1107) | | | |
| pMON136270 | EXP-SETit.TubA3:1:3 | 2.222 | 1.861 | 0.260 |
| | (SEQ ID NO: 19) | | | |
| pMON136272 | EXP-SETit.TubA2:1:3 | 0.302 | 0.253 | 0.035 |
| | (SEQ ID NO: 16) | | | |
| pMON136275 | EXP-SETit.TubA2- | 0.002 | 0.002 | 0.000 |
| | 2:1:1 (SEQ ID NO: 18) | | | |
| pMON136276 | EXP-SETit.Act8:1:1 | 0.678 | 0.568 | 0.079 |
| | (SEQ ID NO: 9) | | | |
| pMON136277 | EXP-SETit.Act8:1:2 | 0.550 | 0.460 | 0.064 |
| | (SEQ ID NO: 10) | | | |
| pMON136278 | EXP-SETit.Act8:c | 0.009 | 0.008 | 0.001 |
| | (SEQ ID NO: 11) | | | |
| pMON136279 | EXP-SETit.TubA2- | 0.004 | 0.004 | 0.001 |
| | 1:1:2 (SEQ ID NO: 17) | | | |
| pMON136280 | EXP-SETit.TubA2:1:1 | 0.378 | 0.317 | 0.044 |
| | (SEQ ID NO: 15) | | | |

[0149] The normalized GUS/Rluc and GUS/Fluc ratios provided in Tables 11 and 12 provide evidence that most of the expression elements are capable of driving GUS expression in corn leaf protoplasts. The constructs, pMON136275 (EXP-SETit.TubA2-2:1:1 (SEQ ID NO: 18)) and pMON136279 (EXP-SETit.TubA2-1:1:2 (SEQ ID NO: 17)) demonstrated the least amount of expression. The construct, pMON136270 (EXP-SETit.TubA3:1:3 (SEQ ID NO: 19)) provided the highest level of expression amongst the test elements relative to the constitutive controls.

### Example 6: Analysis of Actin and Tubulin Regulatory Elements Driving GUS in Wheat Protoplasts

[0150] Wheat leaf protoplasts were transformed with plant expression vectors containing a test transcriptional regulatory expression element group, driving expression of the β-glucuronidase (GUS) transgene, and compared to leaf protoplast in which expression of GUS is driven by known constitutive promoters.

[0151] Wheat protoplast cells, derived from leaf tissue were transformed using PEG based transformation methods known in the art with plant expression vectors to compare expression of a transgene driven by the transcriptional regulatory expression element groups, EXP-SETit.TubA3:1:3 (SEQ ID NO: 19), EXP-SETit.TubA2:1:3 (SEQ ID NO: 16), EXP-SETit.TubA2-2:1:1 (SEQ ID NO: 18), EXP-SETit.Act8:1:1 (SEQ ID NO: 9), EXP-SETit.Act8:1:2 (SEQ ID NO: 10), EXP-SETit.Act8:c (SEQ ID NO: 11), EXP-SETit.TubA2-1:1:2 (SEQ ID NO: 17) and EXP-SETit.TubA2:1:1 (SEQ ID NO: 15) with that of known constitutive promoters. Each transcriptional regulatory expression element group is cloned using methods known in the art into a plant expression vector shown in Table 10 in example above. The resulting plant expression vectors are comprised of a transgene cassette comprised of a transcriptional regulatory expression element group, operably linked 5′ to a coding sequence for β-glucuronidase (GUS) (GUS-1 or GUS-3, represented by SEQ ID NOS: 1090 and 1092, respectively), which is operably linked 5′ to a 3′ termination region derived from the A. tumefaciens Nopaline synthase gene (T-AGRtu.nos-1:1:13, SEQ ID NO: 56) or the wheat Hsp17 gene (T-Ta.Hsp17-1:1:1, SEQ ID NO: 57).

[0152] Control plasmid vector constructs and luciferase transformation control plasmid constructs were the same as those described in example 5. Measurements of both GUS and luciferase activity were conducted as described in example 5.

[0153] To compare the relative activity of each transcriptional regulatory expression element group, GUS values were expressed as a ratio of GUS to luciferase activity and normalized with respect to the expression levels observed for the transcriptional regulatory expression element group EXP-Os.TubA-3:1:1 (SEQ ID NO: 1107). Table 13 below shows the GUS/Rluc ratios normalized with respect to EXP-Os.TubA-3:1:1 expression in corn protoplasts.

[0154] GUS and luciferase activity are measured as described in Example 2 with replicate assays to determine the average level of GUS and luciferase expression in wheat protoplast cells. Mean GUS values are compared to the mean luciferase values and normalized with respect to expression seen in wheat protoplast cells transformed with a GUS expression vector in which GUS is driven by the transcriptional regulatory expression element group, EXP-Os.TubA-3:1:1 (SEQ ID NO: 65) to determine the relative fold activity of GUS expression driven by the transcriptional regulatory expression element groups, EXP-SETit.TubA3:1:3 (SEQ ID NO: 19), EXP-SETit.TubA2:1:3 (SEQ ID NO: 16), EXP-SETit.TubA2-2:1:1 (SEQ ID NO: 18), EXP-SETit.Act8:1:1 (SEQ ID NO: 9), EXP-SETit.Act8:1:2 (SEQ ID NO: 10), EXP-SETit.Act8:c (SEQ ID NO: 11), EXP-SETit.TubA2-1:1:2 (SEQ ID NO: 17) and EXP-SETit.TubA2:1:1 (SEQ ID NO: 15).

[0155] The mean GUS and luciferase expression levels are provided in Table 13. The Renilla luciferase values are provided in the column labeled “Rluc”.

TABLE 13
Mean GUS/Rluc fold expression relative to EXP-Os.TubA-3:1:1 expression in corn
leaf protoplast cells.

| | | | Gus/Rluc | Gus/Rluc |
|---|---|---|---|---|
| | | | Normalized | Normalized |
| | Transcriptional | | with respect to | with respect |
| | Regulatory Element | Mean | EXP- | to EXP- |
| Construct | Group | Gus/RLuc | Os.TubA-3:1:1 | Os.Act1:1:1 |
| pMON19469 | EXP-CaMV.35S-enh/ | 12.540 | 22.423 | 1.030 |
| | I-Zm.DnaK-1:1:1 | | | |
| | (SEQ ID NO: 1102) | | | |
| pMON65328 | EXP-CaMV.35S-enh- | 16.371 | 29.274 | 1.345 |
| | Lhcb1/I-Os.Act1- | | | |
| | 1:1:9 (SEQ ID NO: 1105) | | | |
| pMON25455 | EXP-Os.Act1:1:1 | 12.175 | 21.770 | 1.000 |
| | (SEQ ID NO: 1098) | | | |
| pMON122605 | EXP-Os.TubA-3:1:1 | 0.559 | 1.000 | 0.046 |
| | (SEQ ID NO: 1107) | | | |
| pMON136270 | EXP-SETit.TubA3:1:3 | 2.300 | 4.112 | 0.189 |
| | (SEQ ID NO: 19) | | | |
| pMON136272 | EXP-SETit.TubA2:1:3 | 0.933 | 1.669 | 0.077 |
| | (SEQ ID NO: 16) | | | |
| pMON136275 | EXP-SETit.TubA2- | 0.028 | 0.051 | 0.002 |
| | 2:1:1 (SEQ ID NO: 18) | | | |
| pMON136276 | EXP-SETit.Act8:1:1 | 1.606 | 2.873 | 0.132 |
| | (SEQ ID NO: 9) | | | |
| pMON136277 | EXP-SETit.Act8:1:2 | 1.281 | 2.291 | 0.105 |
| | (SEQ ID NO: 10) | | | |
| pMON136278 | EXP-SETit.Act8:c | 0.051 | 0.091 | 0.004 |
| | (SEQ ID NO: 11) | | | |
| pMON136279 | EXP-SETit.TubA2- | 0.037 | 0.066 | 0.003 |
| | 1:1:2 (SEQ ID NO: 17) | | | |
| pMON136280 | EXP-SETit.TubA2:1:1 | 1.516 | 2.710 | 0.125 |
| | (SEQ ID NO: 15) | | | |

[0156] The highest level of GUS expression in wheat protoplast was observed in cells transformed with the constructs pMON136270 (EXP-SETit.TubA3:1:3 (SEQ ID NO: 19)); pMON136276 (EXP-SETit.Act8:1:1 (SEQ ID NO: 9)); pMON136277 (EXP-SETit.Act8:1:2 (SEQ ID NO: 10)) and pMON136280 (EXP-SETit.TubA2:1:1 (SEQ ID NO: 15)).

### Example 7: Identification of Transcriptional Regulatory Elements Used for Seed Expression

[0157] Transcriptional regulatory elements comprising promoters, leaders, introns and 3′ UTRs useful in providing expression of a transgene in plant seed and reproductive tissues are identified based upon the expression of expressed sequence tags (ESTs) in cDNA libraries made from messenger RNA isolated from seed, flower and other tissues derived from Foxtail millet (Setaria italica (L.) Beauv). Libraries of cDNA are made from tissues isolated from S. italica using methods known to those skilled in the art from flower tissue at 0, 4, 7, 14, 21 and 31 days after pollination (DAP) as well as leaf and root. The resulting cDNAs are sequenced using various sequencing methods known in the art. The resulting ESTs are assembled into clusters using bioinformatics software such as cic_ref_assemble_complete version 2.01.37139 (CLC bio USA, Cambridge, Massachusetts 02142). Transcript abundance of each cluster is determined by counting the number of cDNA reads for each cluster. Table 14 below shows cluster assemblies that have been produced using cDNAs from libraries made from S. italica tissue isolated from leaf, root and flower at 0, 4, 7, 14, 21 and 31 days after pollination (DAP) that demonstrate expression in specific windows of developing of the developing seed and were either not observed or minimally observed in the leaf and root. Each cluster is annotated using bioinformatics analysis methods such as nucleotide and protein BLAST against public and proprietary data of genes expressed in monocots and dicots. In many cases, a homolog to the cluster was not identified and is indicated in Table 14 as “No homolog”.

TABLE 14
Foxtail millet EST clusters and annotations.

| | SEQ ID | |
|---|---|---|
| Cluster ID | NO: | Annotation |
| SETIT-28JUL09-CLUS10381_5 | 925 | hypothetical protein |
| | | SORBIDRAFT_03g000770 |
| SETIT-28JUL09-CLUS101265_2 | 926 | No homolog |
| SETIT-28JUL09-CLUS6475_-5 | 927 | Putative uncharacterized protein |
| SETIT-28JUL09-CLUS1019870_1 | 928 | Putative uncharacterized protein |
| SETIT-28JUL09-CLUS680767_-4 | 929 | Plastidial ADP-glucose transporter |
| SETIT-28JUL09-CLUS343678_3 | 930 | No homolog |
| SETIT-28JUL09-CLUS7568_3 | 931 | No homolog |
| SETIT-28JUL09-CLUS771450_2 | 932 | No homolog |
| SETIT-28JUL09-CLUS1164825_1 | 933 | No homolog |
| SETIT-28JUL09-CLUS1406_-46 | 934 | No homolog |
| SETIT-28JUL09-CLUS1165324_1 | 935 | No homolog |
| SETIT-28JUL09-CLUS1140244_1 | 936 | No homolog |
| SETIT-28JUL09-CLUS153853_-4 | 937 | No homolog |
| SETIT-28JUL09-CLUS19108_-4 | 938 | No homolog |
| SETIT-28JUL09-CLUS23464_-6 | 939 | Putative uncharacterized protein OS=Oryza |
| SETIT-28JUL09-CLUS1180442_1 | 940 | No homolog |
| SETIT-28JUL09-CLUS675196_13 | 941 | Zein-like seed storage protein (Fragment) |
| SETIT-28JUL09-CLUS83_2 | 942 | Granule-bound starch synthase |
| SETIT-28JUL09-CLUS16759_4 | 943 | No homolog |
| SETIT-28JUL09-CLUS5145_3 | 944 | No homolog |
| SETIT-28JUL09-CLUS1193060_1 | 945 | No homolog |
| SETIT-28JUL09-CLUS1187352_1 | 946 | No homolog |
| SETIT-28JUL09-CLUS733_4 | 947 | No homolog |
| SETIT-28JUL09-CLUS4206_-30 | 948 | No homolog |
| SETIT-28JUL09-CLUS4114_2 | 949 | No homolog |
| SETIT-28JUL09-CLUS674506_2 | 950 | Globulin-1 S allele |
| SETIT-28JUL09-CLUS674506_3 | 951 | Vicilin-like embryo storage protein OS=Zea |
| SETIT-28JUL09-CLUS53110_1 | 952 | No homolog |
| SETIT-28JUL09-CLUS2505_8 | 953 | No homolog |
| SETIT-28JUL09-CLUS2888_5 | 954 | Putative uncharacterized protein |
| SETIT-28JUL09-CLUS2219_3 | 955 | No homolog |
| SETIT-28JUL09-CLUS12533_-3 | 956 | Nucleoside diphosphate kinase |
| SETIT-28JUL09-CLUS12533_-6 | 957 | Nucleoside diphosphate kinase |
| SETIT-28JUL09-CLUS2300_3 | 958 | hypothetical protein |
| | | SORBIDRAFT_01g043300 |
| SETIT-28JUL09-CLUS696559_1 | 959 | No homolog |
| SETIT-28JUL09-CLUS681829_1 | 960 | No homolog |
| SETIT-28JUL09-CLUS680981_1 | 961 | No homolog |
| SETIT-28JUL09-CLUS2305_6 | 962 | No homolog |
| SETIT-28JUL09-CLUS685018_1 | 963 | No homolog |
| SETIT-28JUL09-CLUS12299_7 | 964 | Polyprotein (Fragment); Ubiquitin 5 |
| SETIT-28JUL09-CLUS295335_-4 | 965 | No homolog |
| SETIT-28JUL09-CLUS206694_6 | 966 | No homolog |
| SETIT-28JUL09-CLUS1102871_1 | 967 | hypothetical protein |
| | | SORBIDRAFT_03g001990 |
| SETIT-28JUL09-CLUS1104561_1 | 968 | No homolog |
| SETIT-28JUL09-CLUS2723_-8 | 969 | No homolog |
| SETIT-28JUL09-CLUS387500_3 | 970 | No homolog |
| SETIT-28JUL09-CLUS6331_-8 | 971 | hypothetical protein |
| | | SORBIDRAFT_03g007310 |
| SETIT-28JUL09-CLUS1103723_1 | 972 | Os08g0402800 protein |
| SETIT-28JUL09-CLUS482_-8 | 973 | No homolog |
| SETIT-28JUL09-CLUS1096748_1 | 974 | No homolog |
| SETIT-28JUL09-CLUS1127439_1 | 975 | No homolog |
| SETIT-28JUL09-CLUS1115180_1 | 976 | No homolog |
| SETIT-28JUL09-CLUS1108597_1 | 977 | Putative hydrolase OS=Oryza sativa subsp. |
| SETIT-28JUL09-CLUS96386_-2 | 978 | No homolog |
| SETIT-28JUL09-CLUS373929_-2 | 979 | hypothetical protein |
| | | SORBIDRAFT_09g021920 |
| SETIT-28JUL09-CLUS1090880_1 | 980 | Protection of telomeres la protein |
| SETIT-28JUL09-CLUS1130991_1 | 981 | No homolog |
| SETIT-28JUL09-CLUS1131180_1 | 982 | No homolog |
| SETIT-28JUL09-CLUS5112_3 | 983 | No homolog |
| SETIT-28JUL09-CLUS1020178_2 | 984 | No homolog |
| SETIT-28JUL09-CLUS1437_14 | 985 | Anther-specific proline-rich protein APG |
| SETIT-28JUL09-CLUS4707_5 | 986 | Putative uncharacterized protein |
| SETIT-28JUL09-CLUS1130710_1 | 987 | No homolog |
| SETIT-28JUL09-CLUS880479_1 | 988 | No homolog |
| SETIT-28JUL09-CLUS879579_1 | 989 | No homolog |
| SETIT-28JUL09-CLUS17065_3 | 990 | Putative uncharacterized protein OS=Zea |
| | | mays |
| SETIT-28JUL09-CLUS1703_5 | 991 | hypothetical protein |
| | | SORBIDRAFT_01g038035 |
| SETIT-28JUL09-CLUS878855_1 | 992 | No homolog |
| SETIT-28JUL09-CLUS35651_8 | 993 | No homolog |
| SETIT-28JUL09-CLUS533810_3 | 994 | Putative uncharacterized protein |
| SETIT-28JUL09-CLUS888639_1 | 995 | hypothetical protein |
| | | SORBIDRAFT_08g019910 |
| SETIT-28JUL09-CLUS8608_2 | 996 | Putative uncharacterized protein |
| SETIT-28JUL09-CLUS48534_2 | 997 | hypothetical protein |
| | | SORBIDRAFT_04g001090 |
| SETIT-28JUL09-CLUS8620_17 | 998 | No homolog |
| SETIT-28JUL09-CLUS31891_4 | 999 | No homolog |
| SETIT-28JUL09-CLUS6173_1 | 1000 | Os09g0539100 protein |
| SETIT-28JUL09-CLUS884159_1 | 1001 | hypothetical protein |
| | | SORBIDRAFT_05g019890 |
| SETIT-28JUL09-CLUS112639_5 | 1002 | No homolog |
| SETIT-28JUL09-CLUS886862_1 | 1003 | No homolog |
| SETIT-28JUL09-CLUS52311_2 | 1004 | No homolog |
| SETIT-28JUL09-CLUS886157_1 | 1005 | No homolog |
| SETIT-28JUL09-CLUS4920_5 | 1006 | Phosphatidylinositol 4-kinase OS=Oryza |
| SETIT-28JUL09-CLUS1697_9 | 1007 | No homolog |
| SETIT-28JUL09-CLUS18000_5 | 1008 | hypothetical protein |
| | | SORBIDRAFT_10g022890 |
| SETIT-28JUL09-CLUS10981_4 | 1009 | 6-phosphofructokinase |
| SETIT-28JUL09-CLUS880709_1 | 1010 | Ribosomal RNA apurinic site specific lyase |
| SETIT-28JUL09-CLUS882664_1 | 1011 | Os 10g0374600 protein |
| SETIT-28JUL09-CLUS19159_2 | 1012 | hypothetical protein |
| | | SORBIDRAFT_06g017240 |
| SETIT-28JUL09-CLUS5475_-2 | 1013 | No homolog |
| SETIT-28JUL09-CLUS1194621_1 | 1014 | 22kD alpha canein 5 OS=Saccharum |
| | | officinarum; Seed storage protein |
| SETIT-28JUL09-CLUS675196_9 | 1015 | Zein-like seed storage protein (Fragment) |
| SETIT-28JUL09-CLUS719393_1 | 1016 | 10kD delta canein; Delta zein storage protein |
| SETIT-28JUL09-CLUS722936_1 | 1017 | 10kD delta canein |
| SETIT-28JUL09-CLUS722936_-2 | 1018 | 10kD delta canein |
| SETIT-28JUL09-CLUS684877_1 | 1019 | Alpha kafirin OS=Sorghum bicolor |
| SETIT-28JUL09-CLUS675196_-2 | 1020 | Zein-like seed storage protein (Fragment); |
| | | Alpha-coixin |
| SETIT-28JUL09-CLUS691558_2 | 1021 | 27 kDa pennisetin |
| SETIT-28JUL09-CLUS764553_1 | 1022 | 22 kDa pennisetin OS=Pennisetum |
| | | americanum |
| SETIT-28JUL09-CLUS675787_1 | 1023 | 21 kDa pennisetin OS=Pennisetum |
| | | americanum; Alpha-coixin |
| SETIT-28JUL09-CLUS691558_-3 | 1024 | 27 kDa pennisetin |
| SETIT-28JUL09-CLUS675196_11 | 1025 | 22 kDa pennisetin OS=Pennisetum |
| | | americanum |
| SETIT-28JUL09-CLUS722936_-3 | 1026 | No homolog |
| SETIT-28JUL09-CLUS695757_1 | 1027 | Putative uncharacterized protein |
| SETIT-28JUL09-CLUS681682_1 | 1028 | Delta-coixin OS-Coix lachryma-jobi PE=2 |
| | | SV=1; Prolamine |
| SETIT-28JUL09-CLUS675531_1 | 1029 | N-methyltransferase |
| SETIT-28JUL09-CLUS674096_1 | 1030 | No homolog |
| SETIT-28JUL09-CLUS674121_1 | 1031 | Prolamine |
| SETIT-28JUL09-CLUS675389_2 | 1032 | No homolog |
| SETIT-28JUL09-CLUS677324_1 | 1033 | hypothetical protein |
| | | SORBIDRAFT_01g012345 |

[0158] An analysis of the expression of cDNAs for each cluster presented in Table 14 is provided in Table 15 below. For flower tissue, the following total numbers of EST reads were performed; flower 0 DAP, 251341; flower 4 DAP, 39277; flower 7 DAP, 34330; flower 14 DAP, 34920; flower 21 DAP, 42321; flower 31 DAP, 257327. For leaf and root tissue, the following total numbers of EST reads were performed; leaf, 478570 and root, 434180.

TABLE 15
Count of cDNAs expressed corresponding to EST clusters.

| | | | | | | | | | Expression |
|---|---|---|---|---|---|---|---|---|---|
| | DAP | DAP | DAP | DAP | DAP | DAP | | | Window |
| Cluster Annotation | 0 | 4 | 7 | 14 | 21 | 31 | Leaf | Root | and Organ |
| SETIT-28JUL09- | 17 | 331 | 0 | 0 | 0 | 0 | 0 | 0 | 0-7 |
| CLUS10381_5 | | | | | | | | | |
| SETIT-28JUL09- | 12 | 152 | 87 | 0 | 0 | 0 | 0 | 0 | 0-7 |
| CLUS101265_2 | | | | | | | | | |
| SETIT-28JUL09- | 11 | 143 | 82 | 0 | 0 | 0 | 0 | 0 | 0-7 |
| CLUS6475_-5 | | | | | | | | | |
| SETIT-28JUL09- | 14 | 119 | 34 | 0 | 0 | 0 | 0 | 0 | 0-7 |
| CLUS1019870_1 | | | | | | | | | |
| SETIT-28JUL09- | 0 | 0 | 0 | 239 | 100 | 16 | 0 | 0 | 14-31 |
| CLUS680767_-4 | | | | | | | | | |
| SETIT-28JUL09- | 0 | 0 | 0 | 491 | 0 | 0 | 0 | 0 | 14 |
| CLUS343678_3 | | | | | | | | | |
| SETIT-28JUL09- | 0 | 0 | 0 | 486 | 0 | 0 | 0 | 0 | 14 |
| CLUS7568_3 | | | | | | | | | |
| SETIT-28JUL09- | 0 | 0 | 0 | 481 | 0 | 0 | 0 | 0 | 14 |
| CLUS771450_2 | | | | | | | | | |
| SETIT-28JUL09- | 0 | 0 | 0 | 419 | 0 | 0 | 0 | 0 | 14 |
| CLUS1164825_1 | | | | | | | | | |
| SETIT-28JUL09- | 0 | 0 | 0 | 324 | 0 | 0 | 0 | 0 | 14 |
| CLUS1406_-46 | | | | | | | | | |
| SETIT-28JUL09- | 0 | 0 | 0 | 323 | 0 | 0 | 0 | 0 | 14 |
| CLUS1165324_1 | | | | | | | | | |
| SETIT-28JUL09- | 0 | 0 | 0 | 310 | 0 | 0 | 0 | 0 | 14 |
| CLUS1140244_1 | | | | | | | | | |
| SETIT-28JUL09- | 0 | 0 | 0 | 304 | 0 | 0 | 0 | 0 | 14 |
| CLUS153853_-4 | | | | | | | | | |
| SETIT-28JUL09- | 0 | 0 | 0 | 138 | 115 | 0 | 0 | 0 | 14-21 |
| CLUS19108_-4 | | | | | | | | | |
| SETIT-28JUL09- | 0 | 0 | 0 | 132 | 111 | 0 | 0 | 0 | 14-21 |
| CLUS23464_-6 | | | | | | | | | |
| SETIT-28JUL09- | 0 | 0 | 0 | 294 | 247 | 0 | | 0 | 14-21 |
| CLUS1180442_1 | | | | | | | | | |
| SETIT-28JUL09- | 0 | 0 | 0 | 169 | 142 | 0 | 0 | 0 | 14-21 |
| CLUS675196_13 | | | | | | | | | |
| SETIT-28JUL09- | 0 | 0 | 0 | 111 | 187 | 15 | 0 | 0 | 14-31 |
| CLUS83_2 | | | | | | | | | |
| SETIT-28JUL09- | 0 | 0 | 0 | 0 | 525 | 0 | 0 | 0 | 21 |
| CLUS16759_4 | | | | | | | | | |
| SETIT-28JUL09- | 0 | 0 | 0 | 0 | 448 | 0 | 0 | 0 | 21 |
| CLUS5145_3 | | | | | | | | | |
| SETIT-28JUL09- | 0 | 0 | 0 | 0 | 390 | 0 | 0 | 0 | 21 |
| CLUS1193060_1 | | | | | | | | | |
| SETIT-28JUL09- | 0 | 0 | 0 | 0 | 385 | 0 | 0 | 0 | 21 |
| CLUS1187352_1 | | | | | | | | | |
| SETIT-28JUL09- | 0 | 0 | 0 | 0 | 356 | 0 | 0 | 0 | 21 |
| CLUS733_4 | | | | | | | | | |
| SETIT-28JUL09- | 0 | 0 | 0 | 0 | 352 | 0 | 0 | 0 | 21 |
| CLUS4206_-30 | | | | | | | | | |
| SETIT-28JUL09- | 0 | 0 | 0 | 0 | 324 | 0 | 0 | 0 | 21 |
| CLUS4114_2 | | | | | | | | | |
| SETIT-28JUL09- | 0 | 0 | 0 | 0 | 772 | 12 | 0 | 0 | 21-31 |
| CLUS674506_2 | | | | | | | | | |
| SETIT-28JUL09- | 0 | 0 | 0 | 0 | 545 | 9 | 0 | 0 | 21-31 |
| CLUS674506_3 | | | | | | | | | |
| SETIT-28JUL09- | 0 | 0 | 0 | 0 | 0 | 167 | 0 | 9 | 31 |
| CLUS53110_ | | | | | | | | | |
| SETIT-28JUL09- | 0 | 0 | 0 | 0 | 0 | 547 | 0 | 0 | 31 |
| CLUS2505_8 | | | | | | | | | |
| SETIT-28JUL09- | 0 | 0 | 0 | 0 | 0 | 475 | 0 | 0 | 31 |
| CLUS2888_5 | | | | | | | | | |
| SETIT-28JUL09- | 0 | 0 | 0 | 0 | 0 | 369 | 0 | 0 | 31 |
| CLUS2219_3 | | | | | | | | | |
| SETIT-28JUL09- | 0 | 0 | 0 | 0 | 0 | 363 | 0 | 0 | 31 |
| CLUS12533_-3 | | | | | | | | | |
| SETIT-28JUL09- | 0 | 0 | 0 | 0 | 0 | 311 | 0 | 0 | 31 |
| CLUS12533_-6 | | | | | | | | | |
| SETIT-28JUL09- | 0 | 0 | 0 | 0 | 0 | 276 | 0 | 0 | 31 |
| CLUS2300_3 | | | | | | | | | |
| SETIT-28JUL09- | 0 | 0 | 0 | 0 | 0 | 250 | 0 | 0 | 31 |
| CLUS696559_1 | | | | | | | | | |
| SETIT-28JUL09- | 0 | 0 | 0 | 0 | 0 | 246 | 0 | 0 | 31 |
| CLUS681829_1 | | | | | | | | | |
| SETIT-28JUL09- | 0 | 0 | 0 | 0 | 0 | 235 | 0 | 0 | 31 |
| CLUS680981_1 | | | | | | | | | |
| SETIT-28JUL09- | 0 | 0 | 0 | 0 | 0 | 220 | 0 | 0 | 31 |
| CLUS2305_6 | | | | | | | | | |
| SETIT-28JUL09- | 0 | 0 | 0 | 0 | 0 | 217 | 0 | 0 | 31 |
| CLUS685018_1 | | | | | | | | | |
| SETIT-28JUL09- | 0 | 295 | 0 | 0 | 0 | 0 | 0 | 0 | 4 |
| CLUS12299_7 | | | | | | | | | |
| SETIT-28JUL09- | 0 | 569 | 0 | 0 | 0 | 0 | 0 | 0 | 4 |
| CLUS295335_-4 | | | | | | | | | |
| SETIT-28JUL09- | 0 | 387 | 0 | 0 | 0 | 0 | 0 | 0 | 4 |
| CLUS206694_6 | | | | | | | | | |
| SETIT-28JUL09- | 0 | 350 | 0 | 0 | 0 | 0 | 0 | 0 | 4 |
| CLUS1102871_1 | | | | | | | | | |
| SETIT-28JUL09- | 0 | 348 | 0 | 0 | 0 | 0 | 0 | 0 | 4 |
| CLUS1104561_1 | | | | | | | | | |
| SETIT-28JUL09- | 0 | 338 | 0 | 0 | 0 | 0 | 0 | 0 | 4 |
| CLUS2723_-8 | | | | | | | | | |
| SETIT-28JUL09- | 0 | 330 | 0 | 0 | 0 | 0 | 0 | 0 | 4 |
| CLUS387500_3 | | | | | | | | | |
| SETIT-28JUL09- | 0 | 323 | 0 | 0 | 0 | 0 | 0 | 0 | 4 |
| CLUS6331_-8 | | | | | | | | | |
| SETIT-28JUL09- | 0 | 302 | 0 | 0 | 0 | 0 | 0 | 0 | 4 |
| CLUS1103723_1 | | | | | | | | | |
| SETIT-28JUL09- | 0 | 90 | 208 | 0 | 0 | 0 | 0 | 0 | 4-7 |
| CLUS482_-8 | | | | | | | | | |
| SETIT-28JUL09- | 0 | 112 | 129 | 0 | 0 | 0 | 0 | 0 | 4-7 |
| CLUS1096748_1 | | | | | | | | | |
| SETIT-28JUL09- | 0 | 110 | 127 | 0 | 0 | 0 | 0 | 0 | 4-7 |
| CLUS1127439_1 | | | | | | | | | |
| SETIT-28JUL09- | 0 | 104 | 120 | 0 | 0 | 0 | 0 | 0 | 4-7 |
| CLUS1115180_1 | | | | | | | | | |
| SETIT-28JUL09- | 0 | 98 | 113 | 0 | 0 | 0 | 0 | 0 | 4-7 |
| CLUS1108597_1 | | | | | | | | | |
| SETIT-28JUL09- | 0 | 96 | 110 | 0 | 0 | 0 | 0 | 0 | 4-7 |
| CLUS96386_-2 | | | | | | | | | |
| SETIT-28JUL09- | 0 | 91 | 104 | 0 | 0 | 0 | 0 | 0 | 4-7 |
| CLUS373929_-2 | | | | | | | | | |
| SETIT-28JUL09- | 0 | 90 | 104 | 0 | 0 | 0 | 0 | 0 | 4-7 |
| CLUS1090880_1 | | | | | | | | | |
| SETIT-28JUL09- | 0 | 0 | 562 | 0 | 0 | 0 | 0 | 0 | 7 |
| CLUS1130991_1 | | | | | | | | | |
| SETIT-28JUL09- | 0 | 0 | 495 | 0 | 0 | 0 | 0 | 0 | 7 |
| CLUS1131180_1 | | | | | | | | | |
| SETIT-28JUL09- | 0 | 0 | 484 | 0 | 0 | 0 | 0 | 0 | 7 |
| CLUS5112_3 | | | | | | | | | |
| SETIT-28JUL09- | 0 | 0 | 471 | 0 | 0 | 0 | 0 | 0 | 7 |
| CLUS1020178_2 | | | | | | | | | |
| SETIT-28JUL09- | 0 | 0 | 461 | 0 | 0 | 0 | 0 | 0 | 7 |
| CLUS1437_14 | | | | | | | | | |
| SETIT-28JUL09- | 0 | 0 | 446 | 0 | 0 | 0 | 0 | 0 | 7 |
| CLUS4707_5 | | | | | | | | | |
| SETIT-28JUL09- | 0 | 0 | 427 | 0 | 0 | 0 | 0 | 0 | 7 |
| CLUS1130710_1 | | | | | | | | | |
| SETIT-28JUL09- | 549 | 0 | 0 | 0 | 0 | 0 | 0 | 0 | Ovule |
| CLUS880479_1 | | | | | | | | | pollen |
| SETIT-28JUL09- | 405 | 0 | 0 | 0 | 0 | 0 | 0 | 0 | Ovule |
| CLUS879579_1 | | | | | | | | | pollen |
| SETIT-28JUL09- | 382 | 0 | 0 | 0 | 0 | 0 | 0 | 0 | Ovule |
| CLUS17065_3 | | | | | | | | | pollen |
| SETIT-28JUL09- | 287 | 0 | 0 | 0 | 0 | 0 | 0) | 8 | Ovule |
| CLUS1703_5 | | | | | | | | | pollen |
| SETIT-28JUL09- | 280 | 0 | 0 | 0 | 0 | 0 | 0 | 0 | Ovule |
| CLUS878855_1 | | | | | | | | | pollen |
| SETIT-28JUL09- | 225 | 0 | 0 | 0 | 0 | 0 | 0 | 0 | Ovule |
| CLUS35651_8 | | | | | | | | | pollen |
| SETIT-28JUL09- | 203 | 0 | 0 | 0 | 0 | 0 | 0 | 0 | Ovule |
| CLUS533810_3 | | | | | | | | | pollen |
| SETIT-28JUL09- | 198 | 0 | 0 | 0 | 0 | 0 | 0 | 0 | Ovule |
| CLUS888639_1 | | | | | | | | | pollen |
| SETIT-28JUL09- | 196 | 0 | 0 | 0 | 0 | 0 | 0 | 0 | Ovule |
| CLUS8608_2 | | | | | | | | | pollen |
| SETIT-28JUL09- | 175 | 0 | 0 | 0 | 0 | 0 | 0 | 0 | Ovule |
| CLUS48534_2 | | | | | | | | | pollen |
| SETIT-28JUL09- | 172 | 0 | 0 | 0 | 0 | 0 | 0 | 0 | Ovule |
| CLUS8620_17 | | | | | | | | | pollen |
| SETIT-28JUL09- | 171 | 0 | 0 | 0 | 0 | 0 | 0 | 0 | Ovule |
| CLUS31891_4 | | | | | | | | | pollen |
| SETIT-28JUL09- | 159 | 0 | 0 | 0 | 0 | 0 | 0 | 0 | Ovule |
| CLUS6173_1 | | | | | | | | | pollen |
| SETIT-28JUL09- | 155 | 0 | 0 | 0 | 0 | 0 | 0 | 0 | Ovule |
| CLUS884159_1 | | | | | | | | | pollen |
| SETIT-28JUL09- | 149 | 0 | 0 | 0 | 0 | 0 | 0 | 0 | Ovule |
| CLUS112639_5 | | | | | | | | | pollen |
| SETIT-28JUL09- | 144 | 0 | 0 | 0 | 0 | 0 | 0 | 0 | Ovule |
| CLUS886862_1 | | | | | | | | | pollen |
| SETIT-28JUL09- | 138 | 0 | 0 | 0 | 0 | 0 | 0 | 0 | Ovule |
| CLUS52311_2 | | | | | | | | | pollen |
| SETIT-28JUL09- | 136 | 0 | 0 | 0 | 0 | 0 | 0 | 0 | Ovule |
| CLUS886157_1 | | | | | | | | | pollen |
| SETIT-28JUL09- | 133 | 0 | 0 | 0 | 0 | 0 | 0 | 0 | Ovule |
| CLUS4920_5 | | | | | | | | | pollen |
| SETIT-28JUL09- | 132 | 0 | 0 | 0 | 0 | 0 | 0 | 0 | Ovule |
| CLUS1697_9 | | | | | | | | | pollen |
| SETIT-28JUL09- | 129 | 0 | 0 | 0 | 0 | 0 | 0 | 0 | Ovule |
| CLUS18000_5 | | | | | | | | | pollen |
| SETIT-28JUL09- | 129 | 0 | 0 | 0 | 0 | 0 | 0 | 0 | Ovule |
| CLUS10981_4 | | | | | | | | | pollen |
| SETIT-28JUL09- | 129 | 0 | 0 | 0 | 0 | 0 | 0 | 0 | Ovule |
| CLUS880709_1 | | | | | | | | | pollen |
| SETIT-28JUL09- | 128 | 0 | 0 | 0 | 0 | 0 | 0 | 0 | Ovule |
| CLUS882664_1 | | | | | | | | | pollen |
| SETIT-28JUL09- | 128 | 0 | 0 | 0 | 0 | 0 | 0 | 0 | Ovule |
| CLUS19159_2 | | | | | | | | | pollen |
| SETIT-28JUL09- | 0 | 0 | 1721 | 12386 | 34684 | 11782 | 0 | 0 | Seed |
| CLUS5475_-2 | | | | | | | | | |
| SETIT-28JUL09- | 0 | 0 | 1386 | 9267 | 23798 | 8799 | 0 | 0 | Seed |
| CLUS1194621_1 | | | | | | | | | |
| SETIT-28JUL09- | 0 | 0 | 1232 | 17098 | 22397 | 17083 | 0 | 0 | Seed |
| CLUS675196_9 | | | | | | | | | |
| SETIT-28JUL09- | 0 | 0 | 1184 | 13872 | 15107 | 13799 | 0 | 0 | Seed |
| CLUS719393_1 | | | | | | | | | |
| SETIT-28JUL09- | 0 | 0 | 1184 | 23792 | 30815 | 25296 | 0 | 0 | Secd |
| CLUS722936_1 | | | | | | | | | |
| SETIT-28JUL09- | 0 | 0 | 1179 | 20955 | 22818 | 17587 | 0 | 0 | Seed |
| CLUS722936_-2 | | | | | | | | | |
| SETIT-28JUL09- | 0 | 58 | 1003 | 5775 | 18118 | 5089 | 0 | 0 | Seed |
| CLUS684877_1 | | | | | | | | | |
| SETIT-28JUL09- | 0 | 0 | 955 | 27322 | 31248 | 23018 | 0 | 0 | Seed |
| CLUS675196_-2 | | | | | | | | | |
| SETIT-28JUL09- | 0 | 0 | 878 | 18204 | 29860 | 18448 | 0 | 0 | Seed |
| CLUS691558_2 | | | | | | | | | |
| SETIT-28JUL09- | 0 | 0 | 771 | 10897 | 12055 | 6685 | 0 | 0 | Seed |
| CLUS764553_1 | | | | | | | | | |
| SETIT-28JUL09- | 0 | 48 | 547 | 11309 | 12229 | 11428 | 0 | 0 | Seed |
| CLUS675787_1 | | | | | | | | | |
| SETIT-28JUL09- | 0 | 0 | 511 | 7149 | 9793 | 4697 | 0 | 0 | Seed |
| CLUS691558_-3 | | | | | | | | | |
| SETIT-28JUL09- | 0 | 0 | 478 | 5648 | 6182 | 5752 | 0 | 0 | Secd |
| CLUS675196_11 | | | | | | | | | |
| SETIT-28JUL09- | 0 | 0 | 255 | 4537 | 4906 | 5131 | 0 | 0 | Seed |
| CLUS722936_-3 | | | | | | | | | |
| SETIT-28JUL09- | 0 | 0 | 240 | 2803 | 3438 | 2313 | 0 | 0 | Seed |
| CLUS695757_1 | | | | | | | | | |
| SETIT-28JUL09- | 0 | 0 | 210 | 5982 | 6290 | 5382 | 0 | 0 | Seed |
| CLUS681682_1 | | | | | | | | | |
| SETIT-28JUL09- | 0 | 58 | 178 | 573 | 346 | 458 | 0 | 0 | Secd |
| CLUS675531_1 | | | | | | | | | |
| SETIT-28JUL09- | 0 | 0 | 114 | 1648 | 2816 | 1837 | 0 | 0 | Seed |
| CLUS674096_1 | | | | | | | | | |
| SETIT-28JUL09- | 0 | 0 | 102 | 6728 | 7852 | 7164 | 0 | 0 | Seed |
| CLUS675389_2 | | | | | | | | | |
| SETIT-28JUL09- | 0 | 56 | 65 | 133 | 74 | 59 | 0 | 0 | Seed |
| CLUS677324_1 | | | | | | | | | |

[0159] As can be seen in Table 15 above, many of the identified clusters demonstrate expression in specific windows of seed development; at 0 DAP in which expression is inferred to be in both ovule and pollen, or during the seed development window from 4 to 31 DAP. The identified cDNA clusters were used to design primers, which were then used with GenomeWalker™ (Clontech Laboratories, Inc, Mountain View, CA) libraries constructed following the manufacturer's protocol to clone the 5′ region of the corresponding genomic DNA sequence. In the case of promoters leaders and introns, this cloned region contained the 5′transctiptional regulatory, 5′ UTR and if present, intron sequence upstream of the protein-coding region for each gene from S. italica. Using this sequence, regulatory elements were bioinformatically identified within the 5′ region for each gene. Bioinformatic analysis was used to identify the transcriptional start site (TSS) and any bi-directionality, introns, or upstream coding sequence present in the sequence. Using the results of this analysis, regulatory elements were defined within the 5′ sequence upstream of the coding sequence of the gene. Primers were then designed to amplify the regulatory elements. The corresponding DNA molecule for each regulatory element was amplified using standard polymerase chain reaction conditions with primers containing unique restriction enzyme sites and genomic DNA isolated from S. italica. The resulting DNA fragments were ligated into a base plant expression vector using standard restriction enzyme digestion of compatible restriction sites and DNA ligation methods. In some cases, high sequence identity between some leaders provided the discovery of regulatory elements from homologous genes. The resulting transcriptional regulatory element groups, promoters, leaders and introns identified through this analysis are presented in Table 16 below:

TABLE 16
Transcriptional regulatory element groups (EXP), Promoters (P),
leaders (L) and introns (I) identified using expression analysis.

| | SEQ ID | |
|---|---|---|
| Annotation | NO: | Description |
| EXP-SETit.CLUS120796-1 | 12 | Cluster 120796-1 |
| EXP-SETit.CLUS19108 | 13 | Cluster 19108 |
| EXP-SETit.Ubq5 | 22 | Ubiquitin 5 |
| P-SETit.Alc1-1:1:1 | 28 | Alpha-coixin |
| P-SETit.Alc1-1:1:2 | 29 | Alpha-coixin |
| P-SETit.Alc2-1:1:2 | 30 | Alpha-coixin |
| P-SETit.CLUS1164825-1-1:1:1 | 37 | Cluster 1164825-1 |
| P-SETit.CLUS1165324-1:1:1 | 38 | Cluster 1165324-1 |
| P-SETit.CLUS120796-1-1:1:1 | 39 | Cluster 120796-1 |
| P-SETit.CLUS19108-1:1:2 | 40 | Cluster 19108 |
| P-SETit.CLUS882664-1-1:1:2 | 41 | Cluster 882664-1 |
| P-SETit.Dzs-1:1:4 | 47 | Delta zein storage protein |
| P-SETit.Dzs-1:1:5 | 48 | Delta zein storage protein |
| P-SETit.EST CLUS675389-2-1:1:2 | 50 | Cluster 675389-2 |
| P-SETit.FM54-1:1:2 | 52 | Cluster 1102871_1 |
| P-SETit.FM63-1:1:2 | 53 | Cluster 1019870_1 |
| P-SETit.Pro1-1:1:2 | 77 | Prolamin |
| P-SETit.Pro2-1:1:3 | 78 | Prolamin |
| P-SETit.Ssp1-1:1:1 | 93 | Seed storage protein |
| P-SETit.Ssp1-1:1:2 | 94 | Seed storage protein |
| P-SETit.Ubq5-1:1:2 | 104 | Ubiquitin 5 |
| L-SETit.Alc1-1:1:1 | 110 | Alpha-coixin |
| L-SETit.Alc2-1:1:1 | 111 | Alpha-coixin |
| L-SETit.CLUS1164825-1-1:1:1 | 118 | Cluster 1164825-1 |
| L-SETit.CLUS120796-1-1:1:1 | 119 | Cluster 120796-1 |
| L-SETit.CLUS120796-1-1:1:2 | 120 | Cluster 120796-1 |
| L-SETit.CLUS19108-1:1:1 | 121 | Cluster 19108 |
| L-SETit.CLUS19108-1:1:2 | 122 | Cluster 19108 |
| L-SETit.CLUS882664-1-1:1:1 | 123 | Cluster 882664-1 |
| L-SETit.Dzs-1:1:1 | 128 | Delta zein storage protein |
| L-SETit.EST CLUS675389-2-1:1:1 | 130 | Cluster 675389-2 |
| L-SETit.Pro1-1:1:1 | 151 | Prolamin |
| L-SETit.Pro2-1:1:2 | 152 | Prolamin |
| L-SETit.Ssp1-1:1:1 | 164 | Seed storage protein |
| L-SETit.Ubq5-1:1:1 | 170 | Ubiquitin 5 |
| I-SETit.CLUS120796-1-1:1:1 | 173 | Cluster 120796-1 |
| I-SETit.CLUS19108-1:1:1 | 174 | Cluster 19108 |
| I-SETit.Ubq5-1:1:2 | 178 | Ubiquitin 5 |

[0160] In some instances, the transcriptional start site could not be identified. The transcriptional regulatory elements, P-SETit.FM54-1:1:2 (SEQ ID NO: 52), P-SETit.FM63-1:1:2 (SEQ ID NO: 53) and P-SETit.CLUS1165324-1:1:1 (SEQ ID NO: 38) may be further comprised of a promoter element operably linked to a leader element or fragment of a leader element.

### Example 8: Analysis of Seed Regulatory Elements Driving GUS in Bombarded Corn Tissues

[0161] Seed, root and leaf tissue isolated from corn plants is bombarded with plant GUS expression and control vectors to determine the capacity of transcriptional regulatory elements derived from Setaria italica to drive expression of a transgene, GUS.

[0162] Corn plant tissues were transformed with the plant GUS expression constructs using particle bombardment, listed in Table 17, below. Regulatory elements presented in example 7 were cloned into a base plant expression vector using standard methods known in the art. The resulting plant expression vectors contained a right border region from Agrobacterium tumefaciens, a first transgene cassette to test the regulatory or chimeric regulatory element comprised of, a regulatory or chimeric regulatory element, operably linked to an intron derived from the HSP70 heat shock protein of Zea mays (I-Zm.DnaK-1:1:1, SEQ ID NO: 1102), operably linked to a coding sequence for β-glucuronidase (GUS) that possessed a processable intron (GUS-2, SEQ ID NO: 1091), operably linked to the 3′ termination region from the rice lipid transfer protein gene (T-Os.LTP-1:1:1, SEQ ID NO: 1089); a second transgene selection cassette used for selection of transformed plant cells that conferred resistance to the herbicide glyphosate (driven by the rice Actin 1 transcriptional regulatory element group, SEQ ID NO: 1098), and a left border region from A. tumefaciens. The resulting plasmids, pMON117992, pMON117993, pMON117994, pMON117995, pMON117996, pMON117997, pMON117998, pMON117999, pMON130551, pMON140500, pMON140501, pMON140502, pMON140503, pMON140504, pMON140505, pMON140506, pMON140507 and pMON140508 are used to transform corn plant tissue using particle bombardment.

TABLE 17
Binary plant transformation constructs and regulatory elements.

| Construct | Regulatory Elements | Reference Cluster |
|---|---|---|
| pMON117992 | P-SETit.EST CLUS675389-2-1:1:2 | SETIT-28Jul09-CLUS675389_2 |
| | (SEQ ID NO: 50) | |
| | L-SETit.EST CLUS675389-2-1:1:1 | |
| | (SEQ ID NO: 130) | |
| pMON117993 | P-SETit.Pro1-1:1:2 (SEQ ID NO: 77) | SETIT-28Jul09-CLUS674121_1 |
| | L-SETit.Pro1-1:1:1 (SEQ ID NO: 151) | |
| pMON117994 | P-SETit.Pro2-1:1:3 (SEQ ID NO: 78) | SETIT-28Jul09-CLUS681682_1 |
| | L-SETit.Pro2-1:1:2 (SEQ ID NO: 152) | |
| pMON117995 | P-SETit.CLUS882664-1-1:1:2 | SETIT-28Jul09-CLUS882664_1 |
| | (SEQ ID NO: 41) | |
| | L-SETit.CLUS882664-1-1:1:1 | |
| | (SEQ ID NO: 123) | |
| pMON117996 | EXP-SETit.CLUS19108 | SETIT-28Jul09-CLUS19108_-4 |
| | (SEQ ID NO: 13) | |
| | P-SETit.CLUS19108-1:1:2 | |
| | (SEQ ID NO: 40) | |
| | L-SETit.CLUS19108-1:1:2 | |
| | (SEQ ID NO: 122) | |
| | I-SETit.CLUS19108-1:1:1 | |
| | (SEQ ID NO: 174) | |
| | L-SETit.CLUS19108-1:1:1 | |
| | (SEQ ID NO: 121) | |
| pMON117997 | P-SETit.Alc1-1:1:1 (SEQ ID NO: 28) | SETIT-28Jul09-CLUS675196_-2 |
| | L-SETit.Alc1-1:1:1 (SEQ ID NO: 110) | |
| pMON117998 | P-SETit.Alc2-1:1:2 (SEQ ID NO: 30) | SETIT-28Jul09-CLUS675787_1 |
| | L-SETit.Alc2-1:1:1 (SEQ ID NO: 111) | |
| pMON117999 | P-SETit.Dzs-1:1:4 (SEQ ID NO: 47) | SETIT-28Jul09-CLUS719393_1 |
| | L-SETit.Dzs-1:1:1 (SEQ ID NO: 128) | |
| pMON130551 | P-SETit.Alc1-1:1:2 (SEQ ID NO: 29) | SETIT-28Jul09-CLUS675196_-2 |
| | L-SETit.Alc1-1:1:1 (SEQ ID NO: 110) | |
| pMON140500 | P-SETit.Dzs-1:1:5 (SEQ ID NO: 48) | SETIT-28Jul09-CLUS719393_1 |
| | L-SETit.Dzs-1:1:1 (SEQ ID NO: 128) | |
| pMON140501 | P-SETit.Ssp1-1:1:1 (SEQ ID NO: 93) | SETIT-28Jul09-CLUS1194621_1 |
| | L-SETit.Ssp1-1:1:1 (SEQ ID NO: 164) | |
| pMON140502 | P-SETit.Ssp1-1:1:2 (SEQ ID NO: 94) | SETIT-28Jul09-CLUS1194621_1 |
| | L-SETit.Ssp1-1:1:1 (SEQ ID NO: 164) | |
| pMON140503 | EXP-SETit.CLUS120796-1 | SETIT-28Jul09-CLUS2300_3 |
| | (SEQ ID NO: 12) | |
| | P-SETit.CLUS120796-1-1:1:1 | |
| | (SEQ ID NO: 39) | |
| | L-SETit.CLUS120796-1-1:1:2 | |
| | (SEQ ID NO: 120) | |
| | I-SETit.CLUS120796-1-1:1:1 | |
| | (SEQ ID NO: 173) | |
| | L-SETit.CLUS120796-1-1:1:1 | |
| | (SEQ ID NO: 119) | |
| pMON140504 | P-SETit.CLUS1164825-1-1:1:1 | SETIT-28Jul09-CLUS1164825_1 |
| | (SEQ ID NO: 37) | |
| | L-SETit.CLUS1164825-1-1:1:1 | |
| | (SEQ ID NO: 118) | |
| pMON140505 | EXP-SETit.Ubq5 (SEQ ID NO: 22) | SETIT-28Jul09-CLUS12299_7 |
| | P-SETit.Ubq5-1:1:2 (SEQ ID NO: 104) | |
| | L-SETit.Ubq5-1:1:1 (SEQ ID NO: 170) | |
| | I-SETit.Ubq5-1:1:2 (SEQ ID NO: 178) | |
| pMON140506 | P-SETit.FM54-1:1:2 (SEQ ID NO: 52) | SETIT-28Jul09-CLUS1102871_1 |
| pMON140507 | P-SETit.FM63-1:1:2 (SEQ ID NO: 53) | SETIT-28Jul09-CLUS1019870_1 |
| pMON140508 | P-SETit.CLUS1165324-1:1:1 | SETIT-28Jul09-CLUS1165324_1 |
| | (SEQ ID NO: 38) | |

[0163] The plant transformation vector, pMON117992 is comprised of the promoter element, P-SETit.EST CLUS675389-2-1:1:2 (SEQ ID NO: 50), operably linked 5′ to the leader element, L-SETit.EST CLUS675389-2-1:1:1 (SEQ ID NO:130). The plant transformation vector, pMON117993 is comprised of the promoter element, P-SETit.Pro 1-1:1:2 (SEQ ID NO: 77), operably linked 5′ to the leader element, L-SETit.Pro1-1:1:1 (SEQ ID NO: 151). The plant transformation vector, pMON117994 is comprised of the promoter element, P-SETit.Pro2-1:1:3 (SEQ ID NO: 78), operably linked 5′ to the leader element, L-SETit.Pro2-1:1:2 (SEQ ID NO: 152). The plant transformation vector, pMON117995 is comprised of the promoter element, P-SETit.CLUS882664-1-1:1:2 (SEQ ID NO: 41), operably linked 5′ to the leader element, L-SETit.CLUS882664-1-1:1:1 (SEQ ID NO: 123). The plant transformation vector, pMON117996 is comprised of the transcriptional regulatory element group, EXP-SETit.CLUS19108 (SEQ ID NO: 13), which is further comprised of the promoter element, P-SETit.CLUS19108-1:1:2 (SEQ ID NO: 40), operably linked 5′ to the leader element, L-SETit.CLUS19108-1:1:2 (SEQ ID NO: 122), operably linked 5′ to the intron element, I-SETit.CLUS19108-1:1:1 (SEQ ID NO: 174), operably linked 5′ to the leader element, L-SETit.CLUS19108-1:1:1 (SEQ ID NO: 121). The plant transformation vector, pMON117997 is comprised of the promoter element, P-SETit.Alc1-1:1:1 (SEQ ID NO: 28), operably linked 5′ to the leader element, L-SETit.Alc1-1:1:1 (SEQ ID NO: 110). The plant transformation vector, pMON117998 is comprised of the promoter element, P-SETit.Alc2-1:1:2 (SEQ ID NO: 30), operably linked 5′ to the leader element, L-SETit.Alc2-1:1:1 (SEQ ID NO: 111). The plant transformation vector, pMON117999 is comprised of the promoter element, P-SETit.Dzs-1:1:4 (SEQ ID NO: 47), operably linked 5′ to the leader element, L-SETit.Dzs-1:1:1 (SEQ ID NO: 128). The plant transformation vector, pMON130551 is comprised of the promoter element, P-SETit.Alc1-1:1:2 (SEQ ID NO: 29), operably linked 5′ to the leader element, L-SETit.Alc1-1:1:1 (SEQ ID NO: 110). The plant transformation vector, pMON140500 is comprised of the promoter element, P-SETit.Dzs-1:1:5 (SEQ ID NO: 48), operably linked 5′ to the leader element, L-SETit.Dzs-1:1:1 (SEQ ID NO: 128). The plant transformation vector, pMON140501 is comprised of the promoter element, P-SETit.Ssp1-1:1:1 (SEQ ID NO: 93), operably linked 5′ to the leader element, L-SETit.Ssp1-1:1:1 (SEQ ID NO: 164). The plant transformation vector, pMON140502 is comprised of the promoter element, P-SETit.Ssp1-1:1:2 (SEQ ID NO: 94), operably linked 5′ to the leader element, L-SETit.Ssp1-1:1:1 (SEQ ID NO: 164). The plant transformation vector, pMON140503 is comprised of the transcriptional regulatory element group, EXP-SETit.CLUS120796-1 (SEQ ID NO: 12), which is further comprised of the promoter element, P-SETit.CLUS120796-1-1:1:1 (SEQ ID NO: 39), operably linked 5′ to the leader element, L-SETit.CLUS120796-1-1:1:2 (SEQ ID NO: 120), operably linked 5′ to the intron element, I-SETit.CLUS120796-1-1:1:1 (SEQ ID NO: 173), operably linked 5′ to the leader element, L-SETit.CLUS120796-1-1:1:1 (SEQ ID NO: 119). The plant transformation vector, pMON140504 is comprised of the promoter element, P-SETit.CLUS1164825-1-1:1:1 (SEQ ID NO: 37), operably linked 5′ to the leader element, L-SETit.CLUS1164825-1-1:1:1 (SEQ ID NO: 118). The plant transformation vector, pMON140505 is comprised of the transcriptional regulatory element group, EXP-SETit.Ubq5 (SEQ ID NO: 22), which is further comprised of the promoter element, P-SETit.Ubq5-1:1:2 (SEQ ID NO: 104), operably linked 5′ to the leader element, L-SETit.Ubq5-1:1:1 (SEQ ID NO: 170), operably linked 5′ to the intron element, I-SETit.Ubq5-1:1:2 (SEQ ID NO: 178). The plant transformation vector, pMON140506 is comprised of the promoter element, P-SETit.FM54-1:1:2 (SEQ ID NO: 52). The plant transformation vector, pMON140507 is comprised of the promoter element, P-SETit.FM63-1:1:2 (SEQ ID NO: 53). The plant transformation vector, pMON140508 is comprised of the promoter element, P-SETit.CLUS1165324-1:1:1 (SEQ ID NO: 38).

[0164] Corn plant tissues are transformed using particle bombardment methods and LH244 corn seeds as outlined in Example 3 above. The bombarded root and leaf tissues are allowed to incubate in the dark for 24 hours at 26° C. Following this overnight incubation, the tissues are stained in solution for GUS expression overnight at 37 degrees Celsius. After staining overnight, the tissues are soaked in 70% ethanol overnight to remove chlorophyll and reveal the GUS staining. The tissues are then photographed and a rating scale of “0” to “4” reflecting the level of GUS expression is assigned to each construct.

[0165] Expression of the GUS transgene demonstrated in each tissue is used to infer the relative potential level and specificity of each element's capacity to drive transgene expression in stably transformed corn plants. Average GUS expression ratings are provided in Table 18 below.

TABLE 18
GUS expression ratings for particle bombardment assay of potential seed
promoters.

| Construct | Regulatory Elements | Embryo | Endosperm | Root | Leaf |
|---|---|---|---|---|---|
| pMON117992 | P-SETit.EST CLUS675389-2- | 1 | 1 | 1 | 0 |
| | 1:1:2 (SEQ ID NO: 50) | | | | |
| | L-SETit.EST CLUS675389-2- | | | | |
| | 1:1:1 (SEQ ID NO: 130) | | | | |
| pMON117993 | P-SETit.Pro1-1:1:2 (SEQ ID | 1 | 3 | 1 | 0 |
| | NO: 77) | | | | |
| | L-SETit.Pro1-1:1:1 (SEQ ID | | | | |
| | NO: 151) | | | | |
| pMON117994 | P-SETit.Pro2-1:1:3 (SEQ ID | 1 | 3 | 1 | 0 |
| | NO: 78) | | | | |
| | L-SETit.Pro2-1:1:2 (SEQ ID | | | | |
| | NO: 152) | | | | |
| pMON117995 | P-SETit.CLUS882664-1-1:1:2 | 0 | 0 | 1 | 0 |
| | (SEQ ID NO: 41) | | | | |
| | L-SETit.CLUS882664-1-1:1:1 | | | | |
| | (SEQ ID NO: 123) | | | | |
| pMON117996 | EXP-SETit.CLUS19108 (SEQ | 3 | 3 | 2 | 0 |
| | ID NO: 13) | | | | |
| | P-SETit.CLUS19108-1:1:2 | | | | |
| | (SEQ ID NO: 40) | | | | |
| | L-SETit.CLUS19108-1:1:2 | | | | |
| | (SEQ ID NO: 122) | | | | |
| | I-SETit.CLUS19108-1:1:1 | | | | |
| | (SEQ ID NO: 174) | | | | |
| | L-SETit.CLUS19108-1:1:1 | | | | |
| | (SEQ ID NO: 121) | | | | |
| pMON117997 | P-SETit.Alc1-1:1:1 (SEQ ID | 1 | 4 | 1 | 0 |
| | NO: 28) | | | | |
| | L-SETit.Alc1-1:1:1 (SEQ ID | | | | |
| | NO: 110) | | | | |
| pMON117998 | P-SETit.Alc2-1:1:2 (SEQ ID | 0 | 3 | 1 | 0 |
| | NO: 30) | | | | |
| | L-SETit. Alc2-1:1:1 (SEQ ID | | | | |
| | NO: 111) | | | | |
| pMON117999 | P-SETit.Dzs-1:1:4 (SEQ ID | 2 | 3 | 2 | 0 |
| | NO: 47) | | | | |
| | L-SETit.Dzs-1:1:1 (SEQ ID | | | | |
| | NO: 128) | | | | |
| pMON130551 | P-SETit. Alc1-1:1:2 (SEQ ID | 1 | 2 | 1 | 0 |
| | NO: 29) | | | | |
| | L-SETit.Alc1-1:1:1 (SEQ ID | | | | |
| | NO: 110) | | | | |
| pMON140500 | P-SETit.Dzs-1:1:5 (SEQ ID | 0 | 3 | 3 | 0 |
| | NO: 48) | | | | |
| | L-SETit.Dzs-1:1:1 (SEQ ID | | | | |
| | NO: 128) | | | | |
| pMON140501 | P-SETit. Ssp1-1:1:1 (SEQ ID | 0 | 2 | 1 | 0 |
| | NO: 93) | | | | |
| | L-SETit. Ssp1-1:1:1 (SEQ ID | | | | |
| | NO: 164) | | | | |
| pMON140502 | P-SETit.Ssp1-1:1:2 (SEQ ID | 0 | 3 | 1 | 0 |
| | NO: 94) | | | | |
| | L-SETit. Ssp1-1:1:1 (SEQ ID | | | | |
| | NO: 164) | | | | |
| pMON140503 | EXP-SETit.CLUS120796-1 | 1 | 0 | 2 | 0 |
| | (SEQ ID NO: 12) | | | | |
| | P-SETit.CLUS120796-1-1:1:1 | | | | |
| | (SEQ ID NO: 39) | | | | |
| | L-SETit.CLUS120796-1-1:1:2 | | | | |
| | (SEQ ID NO: 120) | | | | |
| | I-SETit.CLUS120796-1-1:1:1 | | | | |
| | (SEQ ID NO: 173) | | | | |
| | L-SETit.CLUS120796-1-1:1:1 | | | | |
| | (SEQ ID NO: 119) | | | | |
| pMON140504 | P-SETit.CLUS1164825-1-1:1:1 | 0 | 0 | 1 | 0 |
| | (SEQ ID NO: 37) | | | | |
| | L-SETit.CLUS1164825-1-1:1:1 | | | | |
| | (SEQ ID NO: 118) | | | | |
| pMON140505 | EXP-SETit. Ubq5 (SEQ ID NO: | 4 | 5 | 4 | 4 |
| | 22) | | | | |
| | P-SETit. Ubq5-1:1:2 (SEQ ID | | | | |
| | NO: 104) | | | | |
| | L-SETit. Ubq5-1:1:1 (SEQ ID | | | | |
| | NO: 170) | | | | |
| | I-SETit. Ubq5-1:1:2 (SEQ ID | | | | |
| | NO: 178) | | | | |
| pMON140506 | P-SETit.FM54-1:1:2 (SEQ ID | 1 | 0 | 1 | 0 |
| | NO: 52) | | | | |
| pMON140507 | P-SETit.FM63-1:1:2 (SEQ ID | 1 | 0 | 2 | 0 |
| | NO: 53) | | | | |
| pMON140508 | P-SETit.CLUS1165324-1:1:1 | 0 | 0 | 1 | 0 |
| | (SEQ ID NO: 38) | | | | |

[0166] In all cases, some transgene expression was observed in tissues bombarded with the construct shown above in Table 18. Highest levels of expression in the seed were observed for the tissues bombarded with the constructs, pMON117996 ((EXP-SETit.CLUS19108 (SEQ ID NO: 13) comprised of P-SETit.CLUS19108-1:1:2 (SEQ ID NO: 40)+L-SETit.CLUS19108-1:1:2 (SEQ ID NO: 122)+I-SETit.CLUS19108-1:1:1 (SEQ ID NO: 174)+L-SETit.CLUS19108-1:1:1 (SEQ ID NO: 121)) and pMON140505 ((EXP-SETit.Ubq5 (SEQ ID NO: 22) comprised of P-SETit.Ubq5-1:1:2 (SEQ ID NO: 104)+L-SETit.Ubq5-1:1:1 (SEQ ID NO: 170)+I-SETit.Ubq5-1:1:2 (SEQ ID NO: 178)). Surprisingly, the construct pMON140505 ((EXP-SETit.Ubq5 (SEQ ID NO: 22) comprised of P-SETit.Ubq5-1:1:2 (SEQ ID NO: 104)+L-SETit.Ubq5-1:1:1 (SEQ ID NO: 170)+I-SETit.Ubq5-1:1:2 (SEQ ID NO: 178)) demonstrated high levels of constitutive expression which had not been initially predicted by the EST counts provided in Table 15 of example 7. Some constructs such as, pMON117998 (P-SETit.Alc2-1:1:2 (SEQ ID NO: 30)+L-SETit.Alc2-1:1:1 (SEQ ID NO: 111)); pMON140500 (P-SETit.Dzs-1:1:5 (SEQ ID NO: 48)+L-SETit.Dzs-1:1:1 (SEQ ID NO: 128)); pMON140501 (P-SETit.Ssp1-1:1:1 (SEQ ID NO: 93)+L-SETit.Ssp1-1:1:1 (SEQ ID NO: 164) and pMON140502 (P-SETit.Ssp1-1:1:2 (SEQ ID NO: 94)+L-SETit.Ssp1-1:1:1 (SEQ ID NO: 164)), demonstrated expression in the endosperm and not the embryo. In addition, while the construct, pMON140500 (P-SETit.Dzs-1:1:5 (SEQ ID NO: 48)+L-SETit.Dzs-1:1:1 (SEQ ID NO: 128)) demonstrated expression in only the endosperm, the construct, pMON117999 (P-SETit.Dzs-1:1:4 (SEQ ID NO: 47)+L-SETit.Dzs-1:1:1 (SEQ ID NO: 128)), which is comprised of a longer version of the Dzs promoter, (P-SETit.Dzs-1:1:5 (SEQ ID NO: 48)), demonstrated expression in both endosperm and embryo, suggesting the potential for an embryo enhancer comprising the fragment deleted from P-SETit.Dzs-1:1:4 (SEQ ID NO: 47) to produce P-SETit.Dzs-1:1:5 (SEQ ID NO: 48).

### Example 9: Regulatory Elements Driving GUS Transgene Expression in Transgenic Corn or Wheat

[0167] Corn or wheat plants are transformed with constructs comprising regulatory elements such as the transcriptional regulatory element groups, provided as SEQ ID NOS: 1 through 22; or the promoters provided as SEQ ID NOS: 23 through 105 and SEQ ID NOS: 353 through 536, operably linked to any of the leaders provided as SEQ ID NOS: 106 through 171 and 537 through 588. The transcriptional regulatory element groups or promoters can be operably linked to a marker transgene such as GUS similar to that as described in example 2 above. In addition, intron elements such as those provided as SEQ ID NOS: 172 through 267 and SEQ ID NOS: 317 through 323 and SEQ ID NOS: 589 through 778 can be operably linked between the expression elements and transgene of interest to improve expression or modulate the expression of the transgene within the transformed plant. The plants are transformed using agrobacterium or particle bombardment methods known in the art. Transformants containing one or two copies of the transgene cassette are selected using methods known in the art. Transformants are then assayed to determine the level of expression of the marker transgene in various tissues of the plant similar to that as described in example 2. F1 progeny are produced by either outcrossing the transformed event with an untransformed event, or through self-fertilization. The F1 progeny are grown and expression of the marker transgene is determined using progeny possessing one or two copies of the transgene cassette. Chimeric regulatory elements comprised of any of the promoters, leader and introns presented above are selected based upon the level of expression and tissue specificity of expression to drive transgenes of agronomic or commercial importance.

### Example 10: Enhancers Derived from the Regulatory Elements

[0168] Enhancers are derived from the promoter elements presented as SEQ ID NOS: 23 through 105 and SEQ ID NOS: 353 through 536. The enhancer element may be comprised of one or more cis regulatory elements that when operably linked 5′ or 3′ to a promoter element, or operably linked 5′ or 3′ to additional enhancer elements that are operably linked to a promoter, can enhance or modulate expression of a transgene, or provide expression of a transgene in a specific cell type or plant organ or at a particular time point in development or circadian rhythm. Enhancers are made by removing the TATA box or functionally similar elements and any downstream sequence from the promoters that allow transcription to be initiated from the promoters presented as SEQ ID NOS: 23 through 105 and SEQ ID NOS: 353 through 536 or fragments thereof, in which the TATA box or functionally similar elements and sequence downstream of the TATA box are removed.

[0169] Enhancer elements are derived from the promoter elements presented as SEQ ID NOS: 23 through 105 and SEQ ID NOS: 353 through 536 and cloned using methods known in the art to be operably linked 5′ or 3′ to a promoter element, or operably linked 5′ or 3′ to additional enhancer elements that are operably linked to a promoter. Alternatively, enhancer elements are cloned using methods known in the art to be operably linked to one or more copies of the enhancer element which are operably linked 5′ or 3′ to a promoter element, or operably linked 5′ or 3′ to additional enhancer elements that are operably linked to a promoter. Enhancer elements can also be cloned using methods known in the art to be operably linked 5′ or 3′ to a promoter element derived from a different genus organism, or operably linked 5′ or 3′ to additional enhancer elements derived from other genus organisms or the same genus organism that are operably linked to a promoter derived from either the same or different genus organism, resulting in a chimeric regulatory element. A GUS expression plant transformation vector is constructed using methods known in the art similar to the constructs described in the previous examples in which the resulting plant expression vectors contains a right border region from A. tumefaciens, a first transgene cassette to test the regulatory or a chimeric regulatory element comprised of, a regulatory or chimeric regulatory element, operably linked to an intron derived from the HSP70 heat shock protein of Zea mays or any of the introns presented as SEQ ID NOS: 172 through 267 and SEQ ID NOS: 317 through 323 and SEQ ID NOS: 589 through 778 or any other intron, operably linked to a coding sequence for β-glucuronidase (GUS) that either possesses a processable intron (GUS-2, SEQ ID NO: 1091) or no intron (GUS-1, SEQ ID NO: 1090), operably linked to the Nopaline synthase 3′ termination region from A. tumefaciens (T-AGRtu.nos-1:1:13, SEQ ID NO: 1088) or the 3′ termination region from the rice lipid transfer protein gene (T-Os.LTP-1:1:1, SEQ ID NO: 1089); a second transgene selection cassette used for selection of transformed plant cells that confers resistance to the herbicide glyphosate (driven by the rice Actin 1 promoter), or alternatively, the antibiotic kanamycin (driven by the rice Actin 1 promoter) and a left border region from A. tumefaciens. The resulting plasmids are used to transform corn plants or other genus plants by the methods described above or by other Agrobacterium-mediated or particle bombardment methods known in the art. Alternatively, protoplast cells derived from corn or other genus plants are transformed using methods known in the art to perform transient assays

[0170] GUS expression driven by the test regulatory element comprising one or more enhancers is evaluated in stable or transient plant assays to determine the effects of the enhancer element on expression of a transgene. Modifications to one or more enhancer elements or duplication of one or more enhancer elements is performed based upon empirical experimentation and the resulting gene expression regulation that is observed using each regulatory element composition. Altering the relative positions of one or more enhancers in the resulting regulatory or chimeric regulatory element may affect the transcriptional activity or specificity of the regulatory or chimeric regulatory element and is determined empirically to identify the best enhancers for the desired transgene expression profile within the corn plant or other genus plant.

### Example 11: Analysis of Intron-Mediated Enhancement of GUS Activity Using Plant Derived Protoplasts

[0171] The introduction of a foreign gene into a new plant host does not always result in a high expression of the incoming gene. Furthermore, if dealing with complex traits, it is sometimes necessary to modulate several genes with spatially or temporarily different expression pattern. Introns can principally provide such modulation. However multiple use of the same intron in one plant has shown to exhibit disadvantages. In those cases it is necessary to have a collection of basic control elements for the construction of appropriate recombinant DNA elements. However, the available collection of introns with expression enhancing properties is limited and alternatives are needed.

[0172] In plants, the inclusion of some introns in gene constructs leads to increased mRNA and protein accumulation relative to constructs lacking the intron. This effect has been termed “intron mediated enhancement” (IME) of gene expression (Mascarenhas et al., (1990) Plant Mol. Biol. 15:913-920). Introns known to stimulate expression in plants have been identified in maize genes (e.g. tubA1, Adh1, Sh1, Ubi1 (Jeon et al. (2000) Plant Physiol. 123:1005-1014; Callis et al. (1987) Genes Dev. 1:1183-1200; Vasil et al. (1989) Plant Physiol. 91:1575-1579; Christiansen et al. (1992) Plant Mol. Biol. 18:675-689) and in rice genes (e.g. salt, tpi: McElroy et al., Plant Cell 2:163-171 (1990); Xu et al., Plant Physiol. 106:459-467 (1994)). Similarly, introns from dicotyledonous plant genes like those from petunia (e.g. rbcS), potato (e.g. st-Is1) and from Arabidopsis thaliana (e.g. ubq3 and pat1) have been found to elevate gene expression rates (Dean et al. (1989) Plant Cell 1:201-208; Leon et al. (1991) Plant Physiol. 95:968-972; Norris et al. (1993) Plant Mol Biol 21:895-906; Rose and Last (1997) Plant J. 11:455-464). It has been shown that deletions or mutations within the splice sites of an intron reduce gene expression, indicating that splicing might be needed for IME (Mascarenhas et al. (1990) Plant Mol Biol. 15:913-920; Clancy and Hannah (2002) Plant Physiol. 130:918-929). However, that splicing per se is not required for a certain IME in dicotyledonous plants has been shown by point mutations within the splice sites of the pat1 gene from A. thaliana (Rose and Beliakoff (2000) Plant Physiol. 122:535-542).

[0173] Enhancement of gene expression by introns is not a general phenomenon because some intron insertions into recombinant expression cassettes fail to enhance expression (e.g. introns from dicot genes (rbcS gene from pea, phaseolin gene from bean and the stls-1 gene from Solanum tuberosum) and introns from maize genes (adh1 gene the ninth intron, hsp81 gene the first intron)) (Chee et al. (1986) Gene 41:47-57; Kuhlemeier et al. (1988) Mol Gen Genet 212:405-411; Mascarenhas et al. (1990) Plant Mol. Biol. 15:913-920; Sinibaldi and Mettler (1992) In WE Cohn, K Moldave, eds, Progress in Nucleic Acid Research and Molecular Biology, Vol 42. Academic Press, New York, pp 229-257; Vancanneyt et al. 1990 Mol. Gen. Genet. 220:245-250). Therefore, not each intron can be employed in order to manipulate the gene expression level of non-endogenous genes or endogenous genes in transgenic plants. What characteristics or specific sequence features must be present in an intron sequence in order to enhance the expression rate of a given gene is not known in the prior art and therefore from the prior art it is not possible to predict whether a given plant intron, when used heterologously, will cause IME.

[0174] An intron is selected based upon experimentation and comparison with an intronless expression vector control to empirically select an intron and configuration within the vector T-DNA element arrangement for optimal expression of a transgene. For example, in the expression of an herbicide resistance gene, such as CP4 which confers resistance to the herbicide glyphosate, it is desirable to have transgene expression within the reproductive tissues as well as the vegetative tissues, to prevent the loss of yield when applying the herbicide. An intron in this instance would be selected upon its ability when operably linked to a constitutive promoter, to enhance expression of the herbicide resistance conferring transgene, particularly within the reproductive cells and tissues of the transgenic plant and thus providing both vegetative and reproductive tolerance to the transgenic plant, when sprayed with the herbicide (see for example International Patent Application, WO2007/098042A2).

[0175] Introns presented as SEQ ID NOS: 16 through 306 are identified using genomic DNA contigs in comparison to expressed sequence tag clusters or cDNA contigs to identify exon and intron sequences within the genomic DNA. In addition, 5′ UTR or leader sequences are also used to define the intron/exon splice junction of one or more introns under conditions when the gene sequence encodes a leader sequence that is interrupted by one or more introns. Introns presented as SEQ ID NOS: 172 through 267 and SEQ ID NOS: 317 through 323 and SEQ ID NOS: 589 through 778 are cloned using methods known in the art into a plant transformation vector to be operably linked 3′ to a transcriptional regulatory element and leader fragment and operably linked 5′ to either a second leader fragment or to coding sequences as depicted in the two transgene cassettes presented in FIG. 15. A first possible transgene cassette (Transgene Cassette Configuration 1 in FIG. 15) is comprised of a promoter or chimeric promoter element [A], operably linked 5′ to a leader element [B], operably linked 5′ to a test intron element [C], operably linked to a coding region [D], which is operably linked to a 3′ UTR element [E]. Alternatively, a second possible transgene cassette (Transgene Cassette Configuration 2 in FIG. 15) is comprised of a promoter or chimeric promoter element [F], operably linked 5′ to a first leader element or first leader element fragment [G], operably linked 5′ to a test intron element [H], operably linked 5′ to a second leader element or first leader element second fragment [I], operably linked to a coding region [J], which is operably linked to a 3′ UTR element [K].

[0176] The first 6 nucleotides on the 5′ end and the last 6 nucleotides on the 3′ end of the introns presented as SEQ ID NOS: 172 through 267 and SEQ ID NOS: 317 through 323 and SEQ ID NOS: 589 through 778 represent nucleotides before and after the intron/exon splice junction, respectively. These short 6 nucleotide sequences can be altered or modified by having additional sequence appended (i.e. native or artificial) to facilitate cloning of the intron into a plant transformation vector, so long as the seventh and eighth nucleotides from the 5′ end (GT) and the seventh and eighth nucleotide from the 3′ end (AG) of SEQ ID NOS: 172 through 267 and SEQ ID NOS: 317 through 323 and SEQ ID NOS: 589 through 778 are preserved, thus preserving the intron/exon splice junction of the intron. It is preferable to avoid using the nucleotide sequence TG or G just prior to the seventh and eighth nucleotides from the 5′ end (GT) and the nucleotide sequence, A or AT from the seventh and eighth nucleotide from the 3′ end (AG) to eliminate the potential of unwanted stop and start codons from being formed during processing of the messenger RNA into the final transcript.

[0177] The introns are assayed for the ability to enhance expression in transient assay or stable plant assay. For transient assay of intron mediated enhancement, a base plant vector is constructed using methods known in the art. The intron is cloned into a base plant vector which comprises an expression cassette comprised of a constitutive promoter such as the Cauliflower mosaic virus promoter, P-CaMV.35S-enh-1:1:9 (SEQ ID NO: 1096), operably linked 5′ to a leader element, L-CaMV.35S-1:1:15 (SEQ ID NO: 1111), operably linked 5′ to a test intron element (SEQ ID NOS: 172 through 267 and SEQ ID NOS: 317 through 323 and SEQ ID NOS: 589 through 778), operably linked to a coding sequence for β-glucuronidase (GUS) that either possesses a processable intron (GUS-2, SEQ ID NO: 1091) or no intron (GUS-1, SEQ ID NO: 1090), operably linked to the Nopaline synthase 3′ termination region from A. tumefaciens (T-AGRtu.nos-1:1:13, SEQ ID NO: 1088). Protoplast cells derived from corn or other genus plant tissue is transformed with the base plant vector and assayed for activity. A comparison of activity is made using a control plasmid comprised of the same transgene cassette as the test plasmid, but without the test intron to see if the intron provides an intron mediated enhancement effect.

[0178] Two plasmids, for use in co-transformation and normalization of data, are also constructed using methods known in the art. Each plasmid contains a specific luciferase coding sequence which is driven by a constitutive transcriptional regulatory expression element group. The plant vector, pMON19437 is comprised of a transgene cassette comprised of a constitutive promoter (EXP-CaMV.35S-enh, SEQ ID NO: 1095), operably linked 5′ to an intron, (I-Zm.DnaK-1:1:1, SEQ ID NO: 1102), operably linked 5′ to a firefly (Photinus pyralis) luciferase coding sequence (LUCIFERASE:1:3, SEQ ID NO: 1109), operably linked 5′ to a 3′ termination region from the A. tumefaciens nopaline synthase gene (T-AGRtu.nos-1:1:13, SEQ ID NO: 1088). The plant vector, pMON63934 is comprised of a transgene cassette comprised of a constitutive transcriptional regulatory expression element group, (EXP-CaMV.35S-enh-Lhcb1, SEQ ID NO: 1106), operably linked 5′ to a sea pansy (Renilla reniformis) luciferase coding sequence (CR-Ren.hRenilla Lucife-0:0:1, SEQ ID NO: 1110), operably linked 5′ to a 3′ termination region from the A. tumefaciens nopaline synthase gene (T-AGRtu.nos-1:1:13, SEQ ID NO: 1088).

[0179] Corn leaf protoplasts or other genus plant protoplasts are transformed using a PEG-based transformation method, similar to those known in the art. Protoplast cells are transformed with a DNA prep comprised of equimolar quantities of the two luciferase expression plasmids, pMON19437 and pMON63934 and one of the test plasmids and incubated overnight in total darkness. After incubation, the cells are rinsed, resuspended and lysed. Measurements of both GUS and luciferase are conducted using aliquots of each lysis preparation. Essentially, the collected, transformed protoplast cells are lysed in 5× passive lysis buffer (Promega). After allowing for lysis, aliquots of the lysed preparation are placed into two different small-well trays. One tray is used for GUS measurements. For quantitative analysis of GUS expression, total protein is extracted from lysis preparation. One microgram of total protein is used with the fluorogenic substrate 4-methyleumbelliferyl-β-D-glucuronide (MUG) in a total reaction volume of 50 microliters. The reaction product, 4-methlyumbelliferone (4-MU), is maximally fluorescent at high pH, where the hydroxyl group is ionized. Addition of a basic solution of sodium carbonate simultaneously stops the assay and adjusts the pH for quantifying the fluorescent product. Fluorescence is measured with excitation at 365 nm, emission at 445 nm using a Fluoromax-3 with Micromax Reader, with slit width set at excitation 2 nm and emission 3 nm. GUS values are expressed as pmol of 4-MU protein per minute per milligram protein (pmol 4-MU min⁻¹ mg⁻¹ protein).

[0180] The second tray is used to perform a dual luciferase assay as outlined in Example 5 above. To compare the relative ability of the intron to enhance expression, GUS values are expressed as a ratio of GUS to luciferase activity and compared with those levels imparted by the constitutive promoter and a known intron standard such as that as the intron derived from the HSP70 heat shock protein of Zea mays, I-Zm.DnaK-1:1:1 (SEQ ID NO: 1102).

[0181] For stable plant assay of the introns presented as SEQ ID NOS: 172 through 267 and SEQ ID NOS: 317 through 323 and SEQ ID NOS: 589 through 778, a GUS expression plant transformation vector is constructed using methods known in the art similar to the constructs described in the previous examples in which the resulting plant expression vectors contains a right border region from A. tumefaciens, a first transgene cassette to test the intron comprised of a constitutive promoter such as the Cauliflower mosaic virus promoter, P-CaMV.35S-enh-1:1:9 (SEQ ID NO: 1096), operably linked 5′ to a leader element, L-CaMV.35S-1:1:15 (SEQ ID NO: 1111), operably linked 5′ to a test intron element (SEQ ID NOS: 16 through 306), operably linked to a coding sequence for β-glucuronidase (GUS) that either possesses a processable intron (GUS-2, SEQ ID NO: 1091) or no intron (GUS-1, SEQ ID NO: 1090), operably linked to the Nopaline synthase 3′ termination region from A. tumefaciens (T-AGRtu.nos-1:1:13, SEQ ID NO: 1088); a second transgene selection cassette used for selection of transformed plant cells that conferrs resistance to the herbicide glyphosate (driven by the rice Actin 1 promoter), or alternatively, the antibiotic kanamycin (driven by the rice Actin 1 promoter) and a left border region from A. tumefaciens. The resulting plasmids are used to transform corn plants or other genus plants by the methods described above or by Agrobacterium-mediated methods known in the art. Single-copy or low copy number transformants are selected for comparison to single-copy or low copy number transformed plants, transformed with a plant transformation vector identical to the test vector but without the test intron to determine if the test intron provides an intron mediated enhancement effect.

[0182] Any of the introns presented as SEQ ID NOS: 172 through 267 and SEQ ID NOS: 317 through 323 and SEQ ID NOS: 589 through 778 can be modified in a number of ways, such as deleting fragments within the intron sequence which may reduce expression or duplication of fragments with the intron that may enhance expression. In addition, sequences within the intron that may affect the specificity of expression to either particular cells types or tissues and organs can be duplicated or altered or deleted to affect expression and patterns of expression of the transgene. In addition, the introns presented as SEQ ID NOS: 172 through 267 and SEQ ID NOS: 317 through 323 and SEQ ID NOS: 589 through 778 can be modified to remove any potential start codons (ATG) that may cause unintentional transcripts from being expressed from improperly spliced introns as different, longer or truncated proteins. Once the intron has been empirically tested, or it has been altered based upon experimentation, the intron is used to enhance expression of a transgene in stably transformed plants that can be of any genus monocot or dicot plant, so long as the intron provides enhancement of the transgene. The intron can also be used to enhance expression in other organisms, such as algae, fungi or animal cells, so long as the intron provides enhancement or attenuation or specificity of expression of the transgene to which it is operably linked.

### Example 12: Plasmid Constructs Comprised of Transgene Cassettes for Analysis of Intron-Mediated Enhancement of GUS Transgene Activity

[0183] Intron elements isolated from Setaria italica are cloned using methods known in the art into plasmid constructs comprising a constitutive promoter to test the effect of the intron on expression of a GUS transgene driven by a constitutive promoter.

[0184] The intron elements presented as SEQ ID NOS: 179 through 267 were cloned into plasmid constructs comprising a constitutive promoter, P-CaMV.35S-enh-1:1:13 (SEQ ID NO: 1112), operably linked 5′ to a leader element, L-CaMV.35S-1:1:15 (SEQ ID NO: 1111), operably linked to a test intron element (SEQ ID NOS: 179 through 267), operably linked 5′ to a GUS coding sequence, (GUS-1, SEQ ID NO: 1090), operably linked 5′ to the Nopaline synthase 3′ termination region from A. tumefaciens (T-AGRtu.nos-1:1:13, SEQ ID NO: 1088). The plasmid construct identifier along with each intron annotation is presented in Table 19 below.

TABLE 19
Plasmid constructs comprising transgene cassettes to evaluate intron-
mediated enhancement of GUS transgene expression.

| | | Intron |
|---|---|---|
| | | SEQ |
| | | ID |
| Construct | Intron Annotation | NO: |
| pMON138824 | I-SETit.14-3-3A-2-1:1:1 | 179 |
| pMON138826 | I-SETit.14-3-3A-3-1:1:2 | 180 |
| pMON138816 | I-SETit.14-3-3A-4-1:1:2 | 181 |
| pMON138813 | I-SETit.14-3-3A-5-1:1:2 | 182 |
| pMON138829 | I-SETit.14-3-3B-2-1:1:1 | 183 |
| pMON138830 | I-SETit.14-3-3B-3-1:1:2 | 184 |
| pMON138820 | I-SETit.14-3-3B-4-1:1:2 | 185 |
| pMON138821 | I-SETit.14-3-3B-5-1:1:2 | 186 |
| pMON138831 | I-SETit.14-3-3C-1-1:1:1 | 187 |
| pMON138823 | I-SETit.14-3-3C-2-1:1:1 | 188 |
| pMON138817 | I-SETit.14-3-3C-3-1:1:2 | 189 |
| pMON138832 | I-SETit.14-3-3C-4-1:1:2 | 190 |
| pMON138822 | I-SETit.14-3-3C-5-1:1:2 | 191 |
| pMON138825 | I-SETit.14-3-3D-1-1:1:2 | 192 |
| pMON138828 | I-SETit.14-3-3D-2-1:1:1 | 193 |
| pMON138814 | I-SETit.14-3-3D-3-1:1:2 | 194 |
| pMON138827 | I-SETit.14-3-3D-4-1:1:3 | 195 |
| pMON138843 | I-SETit.14-3-3D-5-1:1:2 | 196 |
| pMON138835 | I-SETit.14-3-3E-2-1:1:1 | 197 |
| pMON138836 | I-SETit.14-3-3E-3-1:1:2 | 198 |
| pMON138845 | I-SETit.14-3-3E-4-1:1:2 | 199 |
| pMON138841 | I-SETit.14-3-3E-5-1:1:2 | 200 |
| pMON138794 | I-SETit.40S-7S-1_1-1:1:2 | 201 |
| pMON138792 | I-SETit.40S-7S-1_2-1:1:2 | 202 |
| pMON138791 | I-SETit.40S-7S-1_3-1:1:2 | 203 |
| pMON138788 | I-SETit.40S-7S-1_4-1:1:2 | 204 |
| pMON138798 | I-SETit.40S-7S-2_2-1:1:1 | 205 |
| pMON138802 | I-SETit.40S-7S-2_3-1:1:1 | 206 |
| pMON138807 | I-SETit.40S-7S-2_4-1:1:1 | 207 |
| pMON138809 | I-SETit.40S-7S-3_1-1:1:2 | 208 |
| pMON138810 | I-SETit.40S-7S-3_2-1:1:2 | 209 |
| pMON138800 | I-SETit.40S-7S-3_3-1:1:2 | 210 |
| pMON138837 | I-SETit.60S_L10A1-1-1:1:2 | 211 |
| pMON138847 | I-SETit.60S_L10A1-2-1:1:2 | 212 |
| pMON138840 | I-SETit.60S_L10A1-3-1:1:2 | 213 |
| pMON140752 | I-SETit.60S_L10A1-4-1:1:1 | 214 |
| pMON140750 | I-SETit.60S_L10A1-5-1:1:2 | 215 |
| pMON140758 | I-SETit.ASA2-3-1:1:2 | 216 |
| pMON140757 | I-SETit.ClpD-1-1:1:1 | 217 |
| pMON138783 | I-SETit.DnaJ_1-1:1:2 | 218 |
| pMON138848 | I-SETit.DnaJ3-2-1:1:2 | 219 |
| pMON138786 | I-SETit.eEF1g_1-1:1:2 | 220 |
| pMON138787 | I-SETit.eEF1g_4-1:1:3 | 221 |
| pMON138842 | I-SETit.eIF5A1-1-1:1:1 | 222 |
| pMON138833 | I-SETit.eIF5A1-2-1:1:2 | 223 |
| pMON138844 | I-SETit.eIF5A1-3-1:1:2 | 224 |
| pMON138834 | I-SETit.eIF5A1-4-1:1:2 | 225 |
| pMON140751 | I-SETit.eIF5A1-5-1:1:2 | 226 |
| pMON138838 | I-SETit.eIF5A2-1-1:1:2 | 227 |
| pMON138839 | I-SETit.eIF5A2-2-1:1:3 | 228 |
| pMON138846 | I-SETit.eIF5A2-3-1:1:2 | 229 |
| pMON138849 | I-SETit.eIF5A2-4-1:1:2 | 230 |
| pMON140756 | I-SETit.eIF5A2-5-1:1:2 | 231 |
| pMON140753 | I-SETit.eIF5A3-1-1:1:1 | 232 |
| pMON140769 | I-SETit.eIF5A3-2-1:1:2 | 233 |
| pMON140754 | I-SETit.eIF5A3-3-1:1:2 | 234 |
| pMON140760 | I-SETit.eIF5A3-4-1:1:2 | 235 |
| pMON140763 | I-SETit.eIF5A3-5-1:1:2 | 236 |
| pMON138808 | I-SETit.GAD_1-1:1:2 | 237 |
| pMON138819 | I-SETit.GAD_2-1:1:2 | 238 |
| pMON138815 | I-SETit.GAD_3-1:1:2 | 239 |
| pMON138818 | I-SETit.GAD_4-1:1:2 | 240 |
| pMON140765 | I-SETit.Grf1-3-1:1:1 | 241 |
| pMON138806 | I-SETit.GRP-1-1:1:1 | 242 |
| pMON140768 | I-SETit.LSm8-1-1:1:2 | 243 |
| pMON140767 | I-SETit.LSm8-2-1:1:1 | 244 |
| pMON140771 | I-SETit.LSm8-3-1:1:1 | 245 |
| pMON140762 | I-SETit.LSm8-4-1:1:2 | 246 |
| pMON138812 | I-SETit.PGK3_1-1:1:2 | 247 |
| pMON138804 | I-SETit.PGK3_2-1:1:1 | 248 |
| pMON138793 | I-SETit.PIP1_1_2-1:1:1 | 249 |
| pMON138797 | I-SETit.PIP1-1_1-1:1:1 | 250 |
| pMON138796 | I-SETit.PIP1-1_3-1:1:2 | 251 |
| pMON138785 | I-SETit.PIP1-4_3-1:1:2 | 252 |
| pMON138784 | I-SETit.PIP2-2_2-1:1:2 | 253 |
| pMON138789 | I-SETit.PIP2-2_3-1:1:2 | 254 |
| pMON138790 | I-SETit.PIP2-5_2-1:1:2 | 255 |
| pMON138795 | I-SETit.PIP2-5_3-1:1:2 | 256 |
| pMON140764 | I-SETit.Prx17-2-1:1:1 | 257 |
| pMON140766 | I-SETit.Prx3-1-1:1:2 | 258 |
| pMON140770 | I-SETit.SBD-1-1:1:2 | 259 |
| pMON140761 | I-SETit.SBD-2-1:1:1 | 260 |
| pMON140759 | I-SETit.SBD-3-1:1:2 | 261 |
| pMON138799 | I-SETit.TubA2_1-1:1:1 | 262 |
| pMON138801 | I-SETit.TubA2_2-1:1:1 | 263 |
| pMON138805 | I-SETit.TubA2_3-1:1:1 | 264 |
| pMON138811 | I-SETit.TubA3_1-1:1:1 | 265 |
| pMON138803 | I-SETit.TubA3_2-1:1:1 | 266 |
| pMON140755 | I-SETit.Wx1-1-1:1:2 | 267 |

[0185] Each plasmid was used as template for PCR amplification of the transgene cassette for use in protoplast assay as described below.

### Example 13: Analysis of Intron-Mediated Enhancement of GUS Activity Using Corn Protoplasts

[0186] Protoplast cells, derived from corn leaf tissue, are transformed with transgene cassettes in the form of PCR amplicons to determine the effect of each intron on the expression of the transgene, GUS, driven by a constitutive promoter and compared to introns known to have an enhancement effect on transgene expression.

[0187] The constructs described in example 12 above and presented in Table 19 of example 12 were used as template to generate PCR amplicons using methods known in the art comprising a constitutive promoter, P-CaMV.35S-enh-1:1:13 (SEQ ID NO: 1112), operably linked 5′ to a leader element, L-CaMV.35S-1:1:15 (SEQ ID NO: 1111), operably linked to a test intron element (SEQ ID NOS: 179 through 267), operably linked 5′ to a GUS coding sequence, (GUS-1, SEQ ID NO: 1090), operably linked 5′ to the Nopaline synthase 3′ termination region from A. lumefaciens (T-AGRtu.nos-1:1:13, SEQ ID NO: 1088). In addition, amplicons, derived from control plasmids were also generated using the same amplification methods from the control plasmid constructs, pMON19469, pMON65328, pMON25455, pMON8677 and pMON33449. The transgene cassette of pMON19469 is comprised of the transcriptional regulatory element group, EXP-CaMV.35S-enh/I-Zm.DnaK-1:1:1 (SEQ ID NO: 1104) and provides a comparison of the constitutive promoter enhanced using the intron I-Zm.DnaK-1:1:1. The transgene cassette of pMON65328 is comprised of the transcriptional regulatory element group, EXP-CaMV.35S-enh-Lhcb1/I-Os.Act1-1:1:9 (SEQ ID NO: 1105) and provides a comparison of enhancement of the constitutive promoter using the intron, I-Os.Act1-1:1:9. The transgene cassette of pMON25455 is comprised of the transcriptional regulatory element group, EXP-Os.Act1:1:1 (SEQ ID NO: 1098) and provides a comparison of expression using the native promoter, leader and intron of the rice actin 1 gene. The transgene cassette of pMON8677 is comprised of the promoter, P-CaMV.35S-enh-1:1:9 (SEQ ID NO: 1096) operably linked to the GUS coding sequence and provides a comparison of expression with a constitutive promoter without an intron for enhancement. The transgene cassette of pMON33449 is comprised of a variant of the CaMV 35S promoter (P-E35S:1:52, SEQ ID NO: 1117) and provides an additional comparator lacking an intron.

[0188] Protoplast cells, derived from corn leaf tissue are transformed using PEG-based transformation methods known in the art. Briefly, each test and control construct is used to provide template for amplification of the transgene cassette comprising each construct. The resulting amplicon is size fractionated on an agarose gel and the amplicon DNA is excised from the gel. The amplicon DNA is extracted from the gel fragment using methods known in the art and quantified by spectrophotometry. Protoplast cells are transformed using PEG methods known in the art and using either 0.3 or 0.1 pico-moles of PCR amplicon DNA. Two to four replicates are performed for each transformation and the average expression imparted by each construct determined. The mean GUS expression observed for each construct derived amplicon is normalized with respect to expression observed for the amplicon derived from pMON19469 comprised of the intron element, I-Zm.DnaK-1:1:1 (SEQ ID NO: 1102). Tables 20 and 21 below show the normalized average GUS expression imparted amplicons derived from the constructs presented in table 19 of example 12 relative to the average GUS expression imparted to amplicons derived from the control plasmids described above using 0.3 and 0.1 pmol of amplicon, respectively.

TABLE 20
Intron-mediated enhancement of GUS expression in corn protoplasts relative
to I-Zm.DnaK-1:1:1 (SEQ ID NO: 1102) using 0.3 pmol of amplicon DNA.

| | | Intron | | |
|---|---|---|---|---|
| | | SEQ | | |
| | | ID | | Std |
| Construct | Intron Annotation | NO: | Mean | Deviation |
| pMON138842 | I-SETit.eIF5A1-1-1:1:1 | 222 | 3.19777 | 0.14472 |
| pMON140750 | I-SETit.60S_L10A1-5- | 215 | 2.73551 | 0.14472 |
| | 1:1:2 | | | |
| pMON138806 | I-SETit.GRP-1-1:1:1 | 242 | 2.24406 | 0.16711 |
| pMON140768 | I-SETit.LSm8-1-1:1:2 | 243 | 1.79949 | 0.14472 |
| pMON138847 | I-SETit.60S_L10A1-2- | 212 | 1.76055 | 0.14472 |
| | 1:1:2 | | | |
| pMON138805 | I-SETit.TubA2_3-1:1:1 | 264 | 1.6441 | 0.16711 |
| pMON138826 | I-SETit.14-3-3A-3-1:1:2 | 180 | 1.59333 | 0.14472 |
| pMON138844 | I-SETit.eIF5A1-3-1:1:2 | 224 | 1.51864 | 0.16711 |
| pMON138845 | I-SETit.14-3-3E-4-1:1:2 | 199 | 1.47841 | 0.14472 |
| pMON138785 | I-SETit.PIP1-4_3-1:1:2 | 252 | 1.45536 | 0.14472 |
| pMON138812 | I-SETit.PGK3_1-1:1:2 | 247 | 1.36129 | 0.14472 |
| pMON138809 | I-SETit.40S-7S-3_1-1:1:2 | 208 | 1.35665 | 0.14472 |
| pMON138796 | I-SETit.PIP1-1_3-1:1:2 | 251 | 1.30268 | 0.14472 |
| pMON140762 | I-SETit.LSm8-4-1:1:2 | 246 | 1.28583 | 0.14472 |
| pMON138839 | I-SETit.eIF5A2-2-1:1:3 | 228 | 1.26341 | 0.16711 |
| pMON138836 | I-SETit.14-3-3E-3-1:1:2 | 198 | 1.23008 | 0.14472 |
| pMON140767 | I-SETit.LSm8-2-1:1:1 | 244 | 1.22373 | 0.14472 |
| pMON138824 | I-SETit.14-3-3A-2-1:1:1 | 179 | 1.2226 | 0.16711 |
| pMON140754 | I-SETit.eIF5A3-3-1:1:2 | 234 | 1.22009 | 0.14472 |
| pMON138829 | I-SETit.14-3-3B-2-1:1:1 | 183 | 1.17955 | 0.14472 |
| pMON138827 | I-SETit.14-3-3D-4-1:1:3 | 195 | 1.15355 | 0.14472 |
| pMON138831 | I-SETit.14-3-3C-1-1:1:1 | 187 | 1.13972 | 0.20467 |
| pMON138817 | I-SETit.14-3-3C-3-1:1:2 | 189 | 1.09812 | 0.14472 |
| pMON138783 | I-SETit.DnaJ_1-1:1:2 | 218 | 1.08489 | 0.14472 |
| pMON140769 | I-SETit.eIF5A3-2-1:1:2 | 233 | 1.0434 | 0.14472 |
| pMON138792 | I-SETit.40S-7S-1_2-1:1:2 | 202 | 1.04308 | 0.16711 |
| pMON140760 | I-SETit.eIF5A3-4-1:1:2 | 235 | 1.04187 | 0.14472 |
| pMON140758 | I-SETit.ASA2-3-1:1:2 | 216 | 1.01034 | 0.14472 |
| pMON19469 | I-Zm.DnaK-1:1:1 | 1102 | 1 | 0.14472 |
| pMON140761 | I-SETit.SBD-2-1:1:1 | 260 | 0.99105 | 0.16711 |
| pMON138794 | I-SETit.40S-7S-1_1-1:1:2 | 201 | 0.98962 | 0.14472 |
| pMON138789 | I-SETit.PIP2-2_3-1:1:2 | 254 | 0.96195 | 0.14472 |
| pMON138791 | I-SETit.40S-7S-1_3-1:1:2 | 203 | 0.94544 | 0.14472 |
| pMON138830 | I-SETit.14-3-3B-3-1:1:2 | 184 | 0.92124 | 0.16711 |
| pMON140766 | I-SETit.Prx3-1-1:1:2 | 258 | 0.88915 | 0.14472 |
| pMON138803 | I-SETit.TubA3_2-1:1:1 | 266 | 0.83768 | 0.16711 |
| pMON138832 | I-SETit.14-3-3C-4-1:1:2 | 190 | 0.80355 | 0.14472 |
| pMON138848 | I-SETit.DnaJ3-2-1:1:2 | 219 | 0.7898 | 0.16711 |
| pMON138835 | I-SETit.14-3-3E-2-1:1:1 | 197 | 0.78927 | 0.14472 |
| pMON138834 | I-SETit.eIF5A1-4-1:1:2 | 225 | 0.77272 | 0.14472 |
| pMON138821 | I-SETit.14-3-3B-5-1:1:2 | 186 | 0.671 | 0.14472 |
| pMON138849 | I-SETit.eIF5A2-4-1:1:2 | 230 | 0.67063 | 0.14472 |
| pMON138786 | I-SETit.eEF1g_1-1:1:2 | 220 | 0.6574 | 0.16711 |
| pMON140756 | I-SETit.eIF5A2-5-1:1:2 | 231 | 0.6269 | 0.16711 |
| pMON65328 | I-Os.Act1-1:1:19 | 1113 | 0.58395 | 0.14472 |
| pMON138840 | I-SETit.60S_L10A1-3- | 213 | 0.57366 | 0.14472 |
| | 1:1:2 | | | |
| pMON138822 | I-SETit.14-3-3C-5-1:1:2 | 191 | 0.55845 | 0.14472 |
| pMON140757 | I-SETit.ClpD-1-1:1:1 | 217 | 0.53607 | 0.14472 |
| pMON140753 | I-SETit.eIF5A3-1-1:1:1 | 232 | 0.52545 | 0.14472 |
| pMON138820 | I-SETit.14-3-3B-4-1:1:2 | 185 | 0.52034 | 0.16711 |
| pMON138800 | I-SETit.40S-7S-3_3-1:1:2 | 210 | 0.51862 | 0.16711 |
| pMON138828 | I-SETit.14-3-3D-2-1:1:1 | 193 | 0.51592 | 0.14472 |
| pMON138813 | I-SETit.14-3-3A-5-1:1:2 | 182 | 0.51379 | 0.14472 |
| pMON138843 | I-SETit.14-3-3D-5-1:1:2 | 196 | 0.50543 | 0.14472 |
| pMON138825 | I-SETit.14-3-3D-1-1:1:2 | 192 | 0.48895 | 0.14472 |
| pMON138814 | I-SETit.14-3-3D-3-1:1:2 | 194 | 0.48519 | 0.14472 |
| pMON138818 | I-SETit.GAD_4-1:1:2 | 240 | 0.47986 | 0.14472 |
| pMON138811 | I-SETit.TubA3_1-1:1:1 | 265 | 0.47762 | 0.16711 |
| pMON138823 | I-SETit.14-3-3C-2-1:1:1 | 188 | 0.41543 | 0.14472 |
| pMON138837 | I-SETit.60S_L10A1-1- | 211 | 0.40991 | 0.14472 |
| | 1:1:2 | | | |
| pMON138846 | I-SETit.eIF5A2-3-1:1:2 | 229 | 0.40485 | 0.14472 |
| pMON140763 | I-SETit.eIF5A3-5-1:1:2 | 236 | 0.40131 | 0.14472 |
| pMON138838 | I-SETit.eIF5A2-1-1:1:2 | 227 | 0.37694 | 0.14472 |
| pMON138801 | I-SETit.TubA2_2-1:1:1 | 263 | 0.35386 | 0.14472 |
| pMON138804 | I-SETit.PGK3_2-1:1:1 | 248 | 0.35284 | 0.16711 |
| pMON140765 | I-SETit.Grf1-3-1:1:1 | 241 | 0.32325 | 0.16711 |
| pMON140755 | I-SETit.Wx1-1-1:1:2 | 267 | 0.31895 | 0.16711 |
| pMON138790 | I-SETit.PIP2-5_2-1:1:2 | 255 | 0.2957 | 0.16711 |
| pMON140770 | I-SETit.SBD-1-1:1:2 | 259 | 0.29309 | 0.14472 |
| pMON138784 | I-SETit.PIP2-2_2-1:1:2 | 253 | 0.29174 | 0.14472 |
| pMON138808 | I-SETit.GAD_1-1:1:2 | 237 | 0.2874 | 0.14472 |
| pMON138807 | I-SETit.40S-7S-2_4-1:1:1 | 207 | 0.27522 | 0.16711 |
| pMON138819 | I-SETit.GAD_2-1:1:2 | 238 | 0.27038 | 0.14472 |
| pMON138833 | I-SETit.eIF5A1-2-1:1:2 | 223 | 0.25147 | 0.14472 |
| pMON138795 | I-SETit.PIP2-5_3-1:1:2 | 256 | 0.24221 | 0.14472 |
| pMON138802 | I-SETit.40S-7S-2_3-1:1:1 | 206 | 0.23983 | 0.16711 |
| pMON25455 | EXP-Os.Act1 | | 0.21736 | 0.16711 |
| EXP-Os.Act1 (SEQ ID NO: | | | | |
| 1098) | | | | |
| pMON140759 | I-SETit.SBD-3-1:1:2 | 261 | 0.2172 | 0.16711 |
| pMON138787 | I-SETit.eEF1g_4-1:1:3 | 221 | 0.17568 | 0.14472 |
| pMON138810 | I-SETit.40S-7S-3_2-1:1:2 | 209 | 0.16997 | 0.14472 |
| pMON138816 | I-SETit.14-3-3A-4-1:1:2 | 181 | 0.16765 | 0.14472 |
| pMON138815 | I-SETit.GAD_3-1:1:2 | 239 | 0.16017 | 0.20467 |
| pMON138788 | I-SETit.40S-7S-1_4-1:1:2 | 204 | 0.15842 | 0.16711 |
| pMON140752 | I-SETit.60S_L10A1-4- | 214 | 0.15302 | 0.14472 |
| | 1:1:1 | | | |
| pMON140751 | I-SETit.eIF5A1-5-1:1:2 | 226 | 0.14712 | 0.14472 |
| pMON138841 | I-SETit.14-3-3E-5-1:1:2 | 200 | 0.14157 | 0.14472 |
| pMON8677 | No intron | | 0.14109 | 0.14472 |
| pMON138798 | I-SETit.40S-7S-2_2-1:1:1 | 205 | 0.11752 | 0.16711 |
| pMON138793 | I-SETit.PIP1_1_2-1:1:1 | 249 | 0.11305 | 0.14472 |
| pMON33449 | No intron | | 0.10504 | 0.14472 |
| pMON140764 | I-SETit.Prx17-2-1:1:1 | 257 | 0.10398 | 0.16711 |
| pMON140771 | I-SETit.LSm8-3-1:1:1 | 245 | 0.09975 | 0.14472 |
| pMON138797 | I-SETit.PIP1-1_1-1:1:1 | 250 | 0.03152 | 0.14472 |
| pMON138799 | I-SETit.TubA2_1-1:1:1 | 262 | 0.01853 | 0.14472 |
| No DNA | | | 0.001 | 0.20467 |

[0189] Using 0.3 pmol of amplicon, most of the test intron elements, derived from S. italica, enhanced GUS expression relative to the no intron controls using a similar promoter (pMON8677 and pMON33449). Improved enhancement of GUS expression, relative to the intron element, I-Zm.DnaK-1:1:1 (SEQ ID NO: 1102) was observed for the intron elements, I-SETit.eIF5A1-1-1:1:1 (SEQ ID NO: 222), I-SETit.60S_L10A1-5-1:1:2 (SEQ ID NO: 215), I-SETit.GRP-1-1:1:1 (SEQ ID NO: 242), I-SETit.LSm8-1-1:1:2 (SEQ ID NO: 243), I-SETit.60S_L10A1-2-1:1:2 (SEQ ID NO: 212), I-SETit.TubA2_3-1:1:1 (SEQ ID NO: 264), I-SETit.14-3-3A-3-1:1:2 (SEQ ID NO: 180), I-SETit.eIF5A1-3-1:1:2 (SEQ ID NO: 224), I-SETit.14-3-3E-4-1:1:2 (SEQ ID NO: 199), I-SETit.PIP1-4_3-1:1:2 (SEQ ID NO: 252), I-SETit.PGK3_1-1:1:2 (SEQ ID NO: 247), I-SETit.40S-7S-3_1-1:1:2 (SEQ ID NO: 208), I-SETit.PIP1-1_3-1:1:2 (SEQ ID NO: 251), I-SETit.LSm8-4-1:1:2 (SEQ ID NO: 246), I-SETit.eIF5A2-2-1:1:3 (SEQ ID NO: 228), I-SETit.14-3-3E-3-1:1:2 (SEQ ID NO: 198), I-SETit.LSm8-2-1:1:1 (SEQ ID NO: 244), I-SETit.14-3-3A-2-1:1:1 (SEQ ID NO: 179), I-SETit.eIF5A3-3-1:1:2 (SEQ ID NO: 234), I-SETit.14-3-3B-2-1:1:1 (SEQ ID NO: 183), I-SETit.14-3-3D-4-1:1:3 (SEQ ID NO: 195), I-SETit.14-3-3C-1-1:1:1 (SEQ ID NO: 187), I-SETit.14-3-3C-3-1:1:2 (SEQ ID NO: 189), I-SETit.Dna.1_1-1:1:2 (SEQ ID NO: 218), I-SETiteIF5A3-2-1:1:2 (SEQ ID NO: 233), I-SETit.40S-75-1_2-1:1:2 (SEQ ID NO: 202), I-SETiteIF5A3-4-1:1:2 (SEQ ID NO: 235) and I-SETit.ASA2-3-1:1:2 (SEQ ID NO: 216). Data shown in Table 21 below.

TABLE 21
Intron-mediated enhancement of GUS expression in corn protoplasts relative
to I-Zm.DnaK-1:1:1 (SEQ ID NO: 1102) using 0.1 pmol amplicon DNA.

| | | Intron | | |
|---|---|---|---|---|
| | | SEQ | | |
| | | ID | | Std |
| Construct | Intron Annotation | NO: | Mean | Deviation |
| pMON138842 | I-SETit.eIF5A1-1-1:1:1 | 222 | 3.19777 | 0.14472 |
| pMON140750 | I-SETit.60S_L10A1-5- | 215 | 2.73551 | 0.14472 |
| | 1:1:2 | | | |
| pMON138806 | I-SETit.GRP-1-1:1:1 | 242 | 2.24406 | 0.16711 |
| pMON140768 | I-SETit.LSm8-1-1:1:2 | 243 | 1.79949 | 0.14472 |
| pMON138847 | I-SETit.60S_L10A1-2- | 212 | 1.76055 | 0.14472 |
| | 1:1:2 | | | |
| pMON138805 | I-SETit.TubA2_3-1:1:1 | 264 | 1.6441 | 0.16711 |
| pMON138826 | I-SETit.14-3-3A-3-1:1:2 | 180 | 1.59333 | 0.14472 |
| pMON138844 | I-SETit.eIF5A1-3-1:1:2 | 224 | 1.51864 | 0.16711 |
| pMON138845 | I-SETit.14-3-3E-4-1:1:2 | 199 | 1.47841 | 0.14472 |
| pMON138785 | I-SETit.PIP1-4_3-1:1:2 | 252 | 1.45536 | 0.14472 |
| pMON138812 | I-SETit.PGK3_1-1:1:2 | 247 | 1.36129 | 0.14472 |
| pMON138809 | I-SETit.40S-7S-3_1-1:1:2 | 208 | 1.35665 | 0.14472 |
| pMON138796 | I-SETit.PIP1-1_3-1:1:2 | 251 | 1.30268 | 0.14472 |
| pMON140762 | I-SETit.LSm8-4-1:1:2 | 246 | 1.28583 | 0.14472 |
| pMON138839 | I-SETit.eIF5A2-2-1:1:3 | 228 | 1.26341 | 0.16711 |
| pMON138836 | I-SETit.14-3-3E-3-1:1:2 | 198 | 1.23008 | 0.14472 |
| pMON140767 | I-SETit.LSm8-2-1:1:1 | 244 | 1.22373 | 0.14472 |
| pMON138824 | I-SETit.14-3-3A-2-1:1:1 | 179 | 1.2226 | 0.16711 |
| pMON140754 | I-SETit.eIF5A3-3-1:1:2 | 234 | 1.22009 | 0.14472 |
| pMON138829 | I-SETit.14-3-3B-2-1:1:1 | 183 | 1.17955 | 0.14472 |
| pMON138827 | I-SETit.14-3-3D-4-1:1:3 | 195 | 1.15355 | 0.14472 |
| pMON138831 | I-SETit.14-3-3C-1-1:1:1 | 187 | 1.13972 | 0.20467 |
| pMON138817 | I-SETit.14-3-3C-3-1:1:2 | 189 | 1.09812 | 0.14472 |
| pMON138783 | I-SETit.DnaJ_1-1:1:2 | 218 | 1.08489 | 0.14472 |
| pMON140769 | I-SETit.eIF5A3-2-1:1:2 | 233 | 1.0434 | 0.14472 |
| pMON138792 | I-SETit.40S-7S-1_2-1:1:2 | 202 | 1.04308 | 0.16711 |
| pMON140760 | I-SETit.eIF5A3-4-1:1:2 | 235 | 1.04187 | 0.14472 |
| pMON140758 | I-SETit.ASA2-3-1:1:2 | 216 | 1.01034 | 0.14472 |
| pMON19469 | I-Zm.DnaK-1:1:1 | 1102 | 1 | 0.14472 |
| pMON140761 | I-SETit.SBD-2-1:1:1 | 260 | 0.99105 | 0.16711 |
| pMON138794 | I-SETit.40S-7S-1_1-1:1:2 | 201 | 0.98962 | 0.14472 |
| pMON138789 | I-SETit.PIP2-2_3-1:1:2 | 254 | 0.96195 | 0.14472 |
| pMON138791 | I-SETit.40S-7S-1_3-1:1:2 | 203 | 0.94544 | 0.14472 |
| pMON138830 | I-SETit.14-3-3B-3-1:1:2 | 184 | 0.92124 | 0.16711 |
| pMON140766 | I-SETit.Prx3-1-1:1:2 | 258 | 0.88915 | 0.14472 |
| pMON138803 | I-SETit.TubA3_2-1:1:1 | 266 | 0.83768 | 0.16711 |
| pMON138832 | I-SETit.14-3-3C-4-1:1:2 | 190 | 0.80355 | 0.14472 |
| pMON138848 | I-SETit.DnaJ3-2-1:1:2 | 219 | 0.7898 | 0.16711 |
| pMON138835 | I-SETit.14-3-3E-2-1:1:1 | 197 | 0.78927 | 0.14472 |
| pMON138834 | I-SETit.eIF5A1-4-1:1:2 | 225 | 0.77272 | 0.14472 |
| pMON138821 | I-SETit.14-3-3B-5-1:1:2 | 186 | 0.671 | 0.14472 |
| pMON138849 | I-SETit.eIF5A2-4-1:1:2 | 230 | 0.67063 | 0.14472 |
| pMON138786 | I-SETit.eEF1g_1-1:1:2 | 220 | 0.6574 | 0.16711 |
| pMON140756 | I-SETit.eIF5A2-5-1:1:2 | 231 | 0.6269 | 0.16711 |
| pMON65328 | I-Os.Act1-1:1:19 | 1113 | 0.58395 | 0.14472 |
| pMON138840 | I-SETit.60S_L10A1-3- | 213 | 0.57366 | 0.14472 |
| | 1:1:2 | | | |
| pMON138822 | I-SETit.14-3-3C-5-1:1:2 | 191 | 0.55845 | 0.14472 |
| pMON140757 | I-SETit.ClpD-1-1:1:1 | 217 | 0.53607 | 0.14472 |
| pMON140753 | I-SETit.eIF5A3-1-1:1:1 | 232 | 0.52545 | 0.14472 |
| pMON138820 | I-SETit.14-3-3B-4-1:1:2 | 185 | 0.52034 | 0.16711 |
| pMON138800 | I-SETit.40S-7S-3_3-1:1:2 | 210 | 0.51862 | 0.16711 |
| pMON138828 | I-SETit.14-3-3D-2-1:1:1 | 193 | 0.51592 | 0.14472 |
| pMON138813 | I-SETit.14-3-3A-5-1:1:2 | 182 | 0.51379 | 0.14472 |
| pMON138843 | I-SETit.14-3-3D-5-1:1:2 | 196 | 0.50543 | 0.14472 |
| pMON138825 | I-SETit.14-3-3D-1-1:1:2 | 192 | 0.48895 | 0.14472 |
| pMON138814 | I-SETit.14-3-3D-3-1:1:2 | 194 | 0.48519 | 0.14472 |
| pMON138818 | I-SETit.GAD_4-1:1:2 | 240 | 0.47986 | 0.14472 |
| pMON138811 | I-SETit.TubA3_1-1:1:1 | 265 | 0.47762 | 0.16711 |
| pMON138823 | I-SETit.14-3-3C-2-1:1:1 | 188 | 0.41543 | 0.14472 |
| pMON138837 | I-SETit.60S_L10A1-1- | 211 | 0.40991 | 0.14472 |
| | 1:1:2 | | | |
| pMON138846 | I-SETit.eIF5A2-3-1:1:2 | 229 | 0.40485 | 0.14472 |
| pMON140763 | I-SETit.eIF5A3-5-1:1:2 | 236 | 0.40131 | 0.14472 |
| pMON138838 | I-SETit.eIF5A2-1-1:1:2 | 227 | 0.37694 | 0.14472 |
| pMON138801 | I-SETit.TubA2_2-1:1:1 | 263 | 0.35386 | 0.14472 |
| pMON138804 | I-SETit.PGK3_2-1:1:1 | 248 | 0.35284 | 0.16711 |
| pMON140765 | I-SETit.Grf1-3-1:1:1 | 241 | 0.32325 | 0.16711 |
| pMON140755 | I-SETit.Wx1-1-1:1:2 | 267 | 0.31895 | 0.16711 |
| pMON138790 | I-SETit.PIP2-5_2-1:1:2 | 255 | 0.2957 | 0.16711 |
| pMON140770 | I-SETit.SBD-1-1:1:2 | 259 | 0.29309 | 0.14472 |
| pMON138784 | I-SETit.PIP2-2_2-1:1:2 | 253 | 0.29174 | 0.14472 |
| pMON138808 | I-SETit.GAD_1-1:1:2 | 237 | 0.2874 | 0.14472 |
| pMON138807 | I-SETit.40S-7S-2_4-1:1:1 | 207 | 0.27522 | 0.16711 |
| pMON138819 | I-SETit.GAD_2-1:1:2 | 238 | 0.27038 | 0.14472 |
| pMON138833 | I-SETit.eIF5A1-2-1:1:2 | 223 | 0.25147 | 0.14472 |
| pMON138795 | I-SETit.PIP2-5_3-1:1:2 | 256 | 0.24221 | 0.14472 |
| pMON138802 | I-SETit.40S-7S-2_3-1:1:1 | 206 | 0.23983 | 0.16711 |
| pMON25455 | EXP-Os.Act1 | | 0.21736 | 0.16711 |
| EXP-Os.Act1 (SEQ ID NO: | | | | |
| 1098) | | | | |
| pMON140759 | I-SETit.SBD-3-1:1:2 | 261 | 0.2172 | 0.16711 |
| pMON138787 | I-SETit.eEF1g_4-1:1:3 | 221 | 0.17568 | 0.14472 |
| pMON138810 | I-SETit.40S-7S-3_2-1:1:2 | 209 | 0.16997 | 0.14472 |
| pMON138816 | I-SETit.14-3-3A-4-1:1:2 | 181 | 0.16765 | 0.14472 |
| pMON138815 | I-SETit.GAD_3-1:1:2 | 239 | 0.16017 | 0.20467 |
| pMON138788 | I-SETit.40S-7S-1_4-1:1:2 | 204 | 0.15842 | 0.16711 |
| pMON140752 | I-SETit.60S_L10A1-4- | 214 | 0.15302 | 0.14472 |
| | 1:1:1 | | | |
| pMON140751 | I-SETit.eIF5A1-5-1:1:2 | 226 | 0.14712 | 0.14472 |
| pMON138841 | I-SETit.14-3-3E-5-1:1:2 | 200 | 0.14157 | 0.14472 |
| pMON8677 | No intron | | 0.14109 | 0.14472 |
| pMON138798 | I-SETit.40S-7S-2_2-1:1:1 | 205 | 0.11752 | 0.16711 |
| pMON138793 | I-SETit.PIP1_1_2-1:1:1 | 249 | 0.11305 | 0.14472 |
| pMON33449 | No intron | | 0.10504 | 0.14472 |
| pMON140764 | I-SETit.Prx17-2-1:1:1 | 257 | 0.10398 | 0.16711 |
| pMON140771 | I-SETit.LSm8-3-1:1:1 | 245 | 0.09975 | 0.14472 |
| pMON138797 | I-SETit.PIP1-1_1-1:1:1 | 250 | 0.03152 | 0.14472 |
| pMON138799 | I-SETit.TubA2_1-1:1:1 | 262 | 0.01853 | 0.14472 |
| No DNA | | | 0.001 | 0.20467 |

[0190] The basic trend in enhancement was similar using 0.1 pmol of amplicon. Most of the test intron elements, derived from S. italica, enhanced GUS expression relative to the no intron controls using a similar promoter (pMON8677 and pMON33449). Improved enhancement of GUS expression, relative to the intron element, I-Zm.DnaK-1:1:1 (SEQ ID NO: 1102) was observed using the intron elements, I-SETit.LSm8-1-1:1:2 (SEQ ID NO: 243), I-SETit.60S_L10A1-5-1:1:2 (SEQ ID NO: 215), I-SETit.eIF5A1-3-1:1:2 (SEQ ID NO: 224), I-SETit.GRP-1-1:1:1 (SEQ ID NO: 242), I-SETit.14-3-3D-2-1:1:1 (SEQ ID NO: 193), I-SETit.14-3-3D-3-1:1:2 (SEQ ID NO: 194), I-SETit.eIF5A3-3-1:1:2 (SEQ ID NO: 234), I-SETit.LSm8-4-1:1:2 (SEQ ID NO: 246), I-SETit.LSm8-2-1:1:1 (SEQ ID NO: 244), I-SETit.eIF5A3-2-1:1:2 (SEQ ID NO: 233), I-SETit.eIF5A1-4-1:1:2 (SEQ ID NO: 225), I-SETit.ASA2-3-1:1:2 (SEQ ID NO: 216), I-SETit.60S_L10A1-2-1:1:2 (SEQ ID NO: 212), I-SETit.eIF5A2-5-1:1:2 (SEQ ID NO: 231), I-SETit.14-3-3B-3-1:1:2 (SEQ ID NO: 184), I-SETit.14-3-3B-2-1:1:1 (SEQ ID NO: 183), I-SETit.DnaJ3-2-1:1:2 (SEQ ID NO: 219), I-SETit.14-3-3A-3-1:1:2 (SEQ ID NO: 180), I-SETit.eIF5A3-4-1:1:2 (SEQ ID NO: 235), I-SETit.14-3-3C-5-1:1:2 (SEQ ID NO: 191), I-SETit.TubA3_2-1:1:1 (SEQ ID NO: 266), I-SETit.40S-75-1_3-1:1:2 (SEQ ID NO: 203), I-SETit.TubA2_3-1:1:1 (SEQ ID NO: 264), I-SETit.14-3-3C-3-1:1:2 (SEQ ID NO: 189), I-SETit.Prx3-1-1:1:2 (SEQ ID NO: 258) and I-SETit.DnaJ_1-1:1:2 (SEQ ID NO: 218).

### Example 14: Analysis of Intron-Mediated Enhancement of GUS Activity Using Wheat Protoplasts

[0191] Protoplast cells, derived from wheat leaf tissue, are transformed with transgene cassettes in the form of PCR amplicons to determine the effect of each intron on the expression of the transgene, GUS, driven by a constitutive promoter and compared to introns known to have an enhancement effect on transgene expression.

[0192] The constructs described in example 12 above and presented in Table 19 of example 12 were used as template to generate PCR amplicons using methods known in the art comprising a constitutive promoter, P-CaMV.35S-enh-1:1:13 (SEQ ID NO: 1112), operably linked 5′ to a leader element, L-CaMV.35S-1:1:15 (SEQ ID NO: 1111), operably linked to a test intron element (SEQ ID NOS: 179 through 267), operably linked 5′ to a GUS coding sequence, (GUS-1, SEQ ID NO: 1090), operably linked 5′ to the Nopaline synthase 3′ termination region from A. tumefaciens (T-AGRtu.nos-1:1:13, SEQ ID NO: 1088). In addition, amplicons, derived from control plasmids were also generated using the same amplification methods from the control plasmid constructs, pMON19469, pMON65328, pMON25455, pMON8677 and pMON33449. The transgene cassette of pMON19469 is comprised of the transcriptional regulatory element group, EXP-CaMV.35S-enh/I-Zm.DnaK-1:1:1 (SEQ ID NO: 1104) and provides a comparison of the constitutive promoter enhanced using the intron I-Zm.DnaK-1:1:1. The transgene cassette of pMON65328 is comprised of the transcriptional regulatory element group, EXP-CaMV.35S-enh-Lhcb1/I-Os.Act1-1:1:9 (SEQ ID NO: 1105) and provides a comparison of enhancement of the constitutive promoter using the intron, I-Os.Act1-1:1:9. The transgene cassette of pMON25455 is comprised of the transcriptional regulatory element group, EXP-Os.Act1:1:1 (SEQ ID NO: 1098) and provides a comparison of expression using the native promoter, leader and intron of the rice actin 1 gene. The transgene cassette of pMON8677 is comprised of the promoter, P-CaMV.35S-enh-1:1:9 (SEQ ID NO: 1096) operably linked to the GUS coding sequence and provides a comparison of expression with a constitutive promoter without an intron for enhancement. The transgene cassette of pMON33449 is comprised of a variant of the CaMV 35S promoter (P-E35S:1:52, SEQ ID NO: 1117) and provides an additional comparator lacking an intron.

[0193] Protoplast cells, derived from wheat leaf tissue are transformed using PEG-based transformation methods known in the art. Briefly, each test and control construct is used to provide template for amplification of the transgene cassette comprising each construct. The resulting amplicon is size fractionated on an agarose gel and the amplicon DNA is excised from the gel. The amplicon DNA is extracted from the gel fragment using methods known in the art and quantified by spectrophotometry. Protoplast cells are transformed using PEG methods known in the art and using 0.1 pico-moles of PCR amplicon DNA. Two to four replicates are performed for each transformation and the average expression imparted by each construct determined. The mean GUS expression observed for each construct derived amplicon is normalized with respect to expression observed for the amplicon derived from pMON19469 comprised of the intron element, I-Zm.DnaK-1:1:1 (SEQ ID NO: 1102). Tables 22 below show the normalized average GUS expression imparted amplicons derived from the constructs presented in Table 19 of Example 12 relative to the average GUS expression imparted to amplicons derived from the control plasmids described above using 0.1 pmol of amplicon.

TABLE 22
Intron-mediated enhancement of GUS expression in wheat protoplasts
relative to I-Zm.DnaK-1:1:1 (SEQ ID NO: 1102).

| | | Intron | | |
|---|---|---|---|---|
| | | SEQ | | |
| | | ID | | Std |
| Construct | Intron Annotation | NO: | Mean | Deviation |
| pMON140768 | I-SETit.LSm8-1-1:1:2 | 243 | 2.26 | 0.51 |
| pMON140750 | I-SETit.60S_L10A1-5- | 215 | 2.14 | 0.62 |
| | 1:1:2 | | | |
| pMON65328 | I-Os.Act1-1:1:19 | 1113 | 2.06 | 0.96 |
| pMON138844 | I-SETit.eIF5A1-3-1:1:2 | 224 | 1.92 | 0.29 |
| pMON138806 | I-SETit.GRP-1-1:1:1 | 242 | 1.81 | 0.64 |
| pMON138828 | I-SETit.14-3-3D-2-1:1:1 | 193 | 1.75 | 0.71 |
| pMON138814 | I-SETit.14-3-3D-3-1:1:2 | 194 | 1.71 | 0.26 |
| pMON140754 | I-SETit.eIF5A3-3-1:1:2 | 234 | 1.66 | 0.61 |
| pMON140762 | I-SETit.LSm8-4-1:1:2 | 246 | 1.6 | 0.52 |
| pMON140767 | I-SETit.LSm8-2-1:1:1 | 244 | 1.55 | 0.26 |
| pMON140769 | I-SETit.eIF5A3-2-1:1:2 | 233 | 1.53 | 0.52 |
| pMON138834 | I-SETit.eIF5A1-4-1:1:2 | 225 | 1.44 | 0.67 |
| pMON140758 | I-SETit.ASA2-3-1:1:2 | 216 | 1.37 | 0.25 |
| pMON138847 | I-SETit.60S_L10A1-2- | 212 | 1.34 | 1.03 |
| | 1:1:2 | | | |
| pMON140756 | I-SETit.eIF5A2-5-1:1:2 | 231 | 1.33 | 0.53 |
| pMON138830 | I-SETit.14-3-3B-3-1:1:2 | 184 | 1.2 | 0.23 |
| pMON138829 | I-SETit.14-3-3B-2-1:1:1 | 183 | 1.18 | 0.41 |
| pMON138848 | I-SETit.DnaJ3-2-1:1:2 | 219 | 1.17 | 0.1 |
| pMON138826 | I-SETit.14-3-3A-3-1:1:2 | 180 | 1.12 | 0.23 |
| pMON140760 | I-SETit.eIF5A3-4-1:1:2 | 235 | 1.12 | 0.49 |
| pMON138822 | I-SETit.14-3-3C-5-1:1:2 | 191 | 1.1 | 0.33 |
| pMON138803 | I-SETit.TubA3_2-1:1:1 | 266 | 1.08 | 0.19 |
| pMON138791 | I-SETit.40S-7S-1_3-1:1:2 | 203 | 1.06 | 0.13 |
| pMON138805 | I-SETit.TubA2_3-1:1:1 | 264 | 1.03 | 0.34 |
| pMON138817 | I-SETit.14-3-3C-3-1:1:2 | 189 | 1.03 | 0.16 |
| pMON140766 | I-SETit.Prx3-1-1:1:2 | 258 | 1.03 | 0.45 |
| pMON138783 | I-SETit.DnaJ_1-1:1:2 | 218 | 1.02 | 0.43 |
| pMON19469 | I-Zm.DnaK-1:1:1 | 1102 | 1 | 0.96 |
| pMON138846 | I-SETit.eIF5A2-3-1:1:2 | 229 | 0.99 | 0.62 |
| pMON138819 | I-SETit.GAD_2-1:1:2 | 238 | 0.98 | 0.4 |
| pMON140753 | I-SETit.eIF5A3-1-1:1:1 | 232 | 0.98 | 0.16 |
| pMON138835 | I-SETit.14-3-3E-2-1:1:1 | 197 | 0.97 | 0.17 |
| pMON138836 | I-SETit.14-3-3E-3-1:1:2 | 198 | 0.95 | 0.36 |
| pMON138837 | I-SETit.60S_L10A1-1- | 211 | 0.93 | 0.57 |
| | 1:1:2 | | | |
| pMON138813 | I-SETit.14-3-3A-5-1:1:2 | 182 | 0.92 | 0.32 |
| pMON138849 | I-SETit.eIF5A2-4-1:1:2 | 230 | 0.9 | 0.3 |
| pMON138809 | I-SETit.40S-7S-3_1-1:1:2 | 208 | 0.88 | 0.41 |
| pMON140770 | I-SETit.SBD-1-1:1:2 | 259 | 0.84 | 0.5 |
| pMON138811 | I-SETit.TubA3_1-1:1:1 | 265 | 0.83 | 0.12 |
| pMON138833 | I-SETit.eIF5A1-2-1:1:2 | 223 | 0.83 | 0.56 |
| pMON140761 | I-SETit.SBD-2-1:1:1 | 260 | 0.82 | 0.18 |
| pMON138832 | I-SETit.14-3-3C-4-1:1:2 | 190 | 0.77 | 0.44 |
| pMON140757 | I-SETit.ClpD-1-1:1:1 | 217 | 0.77 | 0.52 |
| pMON140759 | I-SETit.SBD-3-1:1:2 | 261 | 0.76 | 0.36 |
| pMON138812 | I-SETit.PGK3_1-1:1:2 | 247 | 0.75 | 0.45 |
| pMON140763 | I-SETit.eIF5A3-5-1:1:2 | 236 | 0.75 | 0.22 |
| pMON138824 | I-SETit.14-3-3A-2-1:1:1 | 179 | 0.74 | 0.39 |
| pMON138839 | I-SETit.eIF5A2-2-1:1:3 | 228 | 0.73 | 0.12 |
| pMON33449 | No intron | | 0.68 | 0.47 |
| pMON138841 | I-SETit.14-3-3E-5-1:1:2 | 200 | 0.67 | 0.35 |
| pMON138827 | I-SETit.14-3-3D-4-1:1:3 | 195 | 0.63 | 0.45 |
| pMON138815 | I-SETit.GAD_3-1:1:2 | 239 | 0.6 | 0.15 |
| pMON25455 | EXP-Os.Act1 | | 0.57 | 0.49 |
| EXP-Os.Act1 | | | | |
| (SEQ ID NO: | | | | |
| 1098) | | | | |
| pMON138804 | I-SETit.PGK3_2-1:1:1 | 248 | 0.56 | 0.42 |
| pMON138823 | I-SETit.14-3-3C-2-1:1:1 | 188 | 0.54 | 0.21 |
| pMON140752 | I-SETit.60S_L10A1-4- | 214 | 0.52 | 0.46 |
| | 1:1:1 | | | |
| pMON140755 | I-SETit.Wx1-1-1:1:2 | 267 | 0.52 | 0.41 |
| pMON138816 | I-SETit.14-3-3A-4-1:1:2 | 181 | 0.51 | 0.2 |
| pMON138808 | I-SETit.GAD_1-1:1:2 | 237 | 0.5 | 0.42 |
| pMON138820 | I-SETit.14-3-3B-4-1:1:2 | 185 | 0.5 | 0.35 |
| pMON138831 | I-SETit.14-3-3C-1-1:1:1 | 187 | 0.49 | 0.42 |
| pMON138838 | I-SETit.eIF5A2-1-1:1:2 | 227 | 0.49 | 0.39 |
| pMON138792 | I-SETit.40S-7S-1_2-1:1:2 | 202 | 0.47 | 0.49 |
| pMON138799 | I-SETit.TubA2_1-1:1:1 | 262 | 0.47 | 0.15 |
| pMON140765 | I-SETit.Grf1-3-1:1:1 | 241 | 0.47 | 0.38 |
| pMON138843 | I-SETit.14-3-3D-5-1:1:2 | 196 | 0.46 | 0.49 |
| pMON140771 | I-SETit.LSm8-3-1:1:1 | 245 | 0.43 | 0.25 |
| pMON138789 | I-SETit.PIP2-2_3-1:1:2 | 254 | 0.42 | 0.26 |
| pMON138794 | I-SETit.40S-7S-1_1-1:1:2 | 201 | 0.4 | 0.28 |
| pMON138788 | I-SETit.40S-7S-1_4-1:1:2 | 204 | 0.39 | 0.32 |
| pMON138840 | I-SETit.60S_L10A1-3- | 213 | 0.39 | 0.35 |
| | 1:1:2 | | | |
| pMON140751 | I-SETit.eIF5A1-5-1:1:2 | 226 | 0.39 | 0.48 |
| pMON138785 | I-SETit.PIP1-4_3-1:1:2 | 252 | 0.38 | 0.33 |
| pMON8677 | No intron | | 0.38 | 0.36 |
| pMON138821 | I-SETit.14-3-3B-5-1:1:2 | 186 | 0.37 | 0.23 |
| pMON138825 | I-SETit.14-3-3D-1-1:1:2 | 192 | 0.37 | 0.31 |
| pMON138797 | I-SETit.PIP1-1_1-1:1:1 | 250 | 0.33 | 0.39 |
| pMON140764 | I-SETit.Prx17-2-1:1:1 | 257 | 0.33 | 0.41 |
| pMON138786 | I-SETit.eEF1g_1-1:1:2 | 220 | 0.32 | 0.29 |
| pMON138818 | I-SETit.GAD_4-1:1:2 | 240 | 0.32 | 0.09 |
| pMON138802 | I-SETit.40S-7S-2_3-1:1:1 | 206 | 0.3 | 0.22 |
| pMON138801 | I-SETit.TubA2_2-1:1:1 | 263 | 0.29 | 0.2 |
| pMON138793 | I-SETit.PIP1_1_2-1:1:1 | 249 | 0.24 | 0.33 |
| pMON138807 | I-SETit.40S-7S-2_4-1:1:1 | 207 | 0.24 | 0.3 |
| pMON138800 | I-SETit.40S-7S-3_3-1:1:2 | 210 | 0.22 | 0.11 |
| pMON138795 | I-SETit.PIP2-5_3-1:1:2 | 256 | 0.21 | 0.19 |
| pMON138790 | I-SETit.PIP2-5_2-1:1:2 | 255 | 0.19 | 0.18 |
| pMON138796 | I-SETit.PIP1-1_3-1:1:2 | 251 | 0.18 | 0.19 |
| pMON138810 | I-SETit.40S-7S-3_2-1:1:2 | 209 | 0.17 | 0.16 |
| pMON138787 | I-SETit.eEF1g_4-1:1:3 | 221 | 0.13 | 0.17 |
| pMON138784 | I-SETit.PIP2-2_2-1:1:2 | 253 | 0.1 | 0.15 |
| pMON138798 | I-SETit.40S-7S-2_2-1:1:1 | 205 | 0.09 | 0.09 |
| No DNA | | | 0 | 0 |
| pMON138842 | I-SETit.eIF5A1-1-1:1:1 | 222 | | |
| pMON138845 | I-SETit.14-3-3E-4-1:1:2 | 199 | | |

[0194] As was observed in corn protoplast cells, many of the test intron elements provided enhancement of transgene expression relative to the intronless controls. Improved enhancement of GUS expression, relative to the intron element, I-Zm.DnaK-1:1:1 (SEQ ID NO: 1102) was observed using the intron elements, I-SETit.LSm8-1-1:1:2 (SEQ ID NO: 243), I-SETit.60S_L10A1-5-1:1:2 (SEQ ID NO: 215), I-SETit.eIF5A1-3-1:1:2 (SEQ ID NO: 224), I-SETit.GRP-1-1:1:1 (SEQ ID NO: 242), I-SETit.14-3-3D-2-1:1:1 (SEQ ID NO: 193), I-SETit.14-3-3D-3-1:1:2 (SEQ ID NO: 194), I-SETit.eIF5A3-3-1:1:2 (SEQ ID NO: 234), I-SETit.LSm8-4-1:1:2 (SEQ ID NO: 246), I-SETit.LSm8-2-1:1:1 (SEQ ID NO: 244), I-SETit.eIF5A3-2-1:1:2 (SEQ ID NO: 233), I-SETit.eIF5A1-4-1:1:2 (SEQ ID NO: 225), I-SETit.ASA2-3-1:1:2 (SEQ ID NO: 216), I-SETit.60S_L10A1-2-1:1:2 (SEQ ID NO: 212), I-SETit.eIF5A2-5-1:1:2 (SEQ ID NO: 231), I-SETit.14-3-3B-3-1:1:2 (SEQ ID NO: 184), I-SETit.14-3-3B-2-1:1:1 (SEQ ID NO: 183), I-SETit.DnaJ3-2-1:1:2 (SEQ ID NO: 219), I-SETit.14-3-3A-3-1:1:2 (SEQ ID NO: 180), I-SETit.eIF5A3-4-1:1:2 (SEQ ID NO: 235), I-SETit.14-3-3C-5-1:1:2 (SEQ ID NO: 191), I-SETit.TubA3_2-1:1:1 (SEQ ID NO: 266), I-SETit.40S-7S-1_3-1:1:2 (SEQ ID NO: 203), I-SETit.TubA2_3-1:1:1 (SEQ ID NO: 264), I-SETit.14-3-3C-3-1:1:2 (SEQ ID NO: 189), I-SETit.Prx3-1-1:1:2 (SEQ ID NO: 258) and I-SETit.DnaJ_1-1:1:2 (SEQ ID NO: 218).

### Example 15. Assay of 3′ Transcription Termination Molecule or 3′ UTRs in Protoplasts

[0195] 3′ transcription termination molecules or 3′ UTRs are isolated from Foxtail millet (Setaria italica (L.) Beauv) and cloned into plant base vectors using methods known in the art to test the effectiveness of the 3′ UTR in terminating transcription as well as enhancing expression of a transgene.

[0196] 3′ UTRs useful in providing expression of a transgene in plants are identified based upon the expression of expressed sequence tags (ESTs) in cDNA libraries made from messenger RNA isolated from seed, flower and other tissues derived from Foxtail millet (Setaria italica (L.) Beauv). Libraries of cDNA are made from tissues isolated from S. italica using methods known to those skilled in the art from flower tissue, seed, leaf and root. The resulting cDNAs are sequenced using various sequencing methods known in the art. The resulting ESTs are assembled into clusters using bioinformatics software such as cic_ref_assemble_complete version 2.01.37139 (CLC bio USA, Cambridge, Massachusetts 02142). Transcript abundance of each cluster is determined by counting the number of cDNA reads for each cluster.

[0197] The identified 3′ UTRs may be comprised of sequence derived from cDNA sequence as well as sequence derived from genomic DNA. The cDNA sequence is used to design primers, which are then used with GenomeWalker™ (Clontech Laboratories, Inc, Mountain View, CA) libraries constructed following the manufacturer's protocol to clone the 3′ region of the corresponding genomic DNA sequence to provide a longer termination sequence. Analysis of relative transcript abundance either by direct counts or normalized counts of observed sequence reads for each tissue library can be used to infer properties about patters of expression. For example, some 3′ UTRs may be found in transcripts seen in higher abundance in root tissue as opposed to leaf. This is suggestive that the transcript is highly expressed in root and that the properties of root expression may be attributable to the transcriptional regulation of the promoter, the lead, the introns or the 3′ UTR. Empirical testing of 3′ UTRs identified by the properties of expression within specific organs, tissues or cell types can result in the identification of 3′ UTRs that enhance expression in those specific organs, tissues or cell types.

[0198] 3′ UTR sequences isolated from S. italica are presented as SEQ ID NOS: 268 through 276 and SEQ ID NOS: 779 through 924. Table 23 below presents 3′ UTRs identified as being useful for control of expression and enhancement of root expression or constitutive expression.

TABLE 23
Transcription termination or 3′ UTR elements derived from S. italica.

| | SEQ | |
|---|---|---|
| | ID | |
| Annotation | NO: | Description |
| T-SETit.Act1-1:1:1 | 268 | Actin 1 |
| T-SETit.Act8-1:1:1 | 269 | Actin 8 |
| T-SETit.Ams1-1:1:1 | 270 | S-adenosylmethionine synthetase 1 |
| T-SETit.Ctpt-1:1:2 | 271 | Triose phosphate/phosphate translocator, |
| | | chloroplast precursor |
| T-SETit.Fba-1:1:1 | 272 | Fructose-bisphosphate aldolase |
| T-SETit.Fnr-1:1:1 | 273 | Ferredoxin-NADP + reductase |
| T-SETit.Mes2-1:1:1 | 274 | Methionine synthase 2 |
| T-SETit.Ntr-1:1:1 | 275 | Nitrite transporter |
| T-SETit.Sus2-1:1:1 | 276 | Sucrose synthase 2 |
| T-SETit.36384-1:1:1 | 779 | Cluster 36384 |
| T-SETit.37025-1:1:1 | 780 | Cluster 37025 |
| T-SETit.37470-1:1:1 | 781 | Cluster 37470 |
| T-SETit.Ams2-1:1:1 | 782 | S-adenosylmethionine synthetase 2 |
| T-SETit.Atps-1:1:1 | 783 | ATP synthase subunit gamma |
| T-SETit.Cab-1:1:1 | 784 | Chlorophyll a/b binding protein |
| T-SETit.Cab1-1:1:1 | 785 | Chlorophyll a/b binding protein |
| T-SETit.Ctpt-1:1:1 | 786 | Triose phosphate/phosphate translocator, |
| | | chloroplast precursor |
| T-SETit.DnaK-1:1:1 | 787 | Heat shock protein |
| T-SETit.Fba-1:1:2 | 788 | Fructose-bisphosphate aldolase |
| T-SETit.Fba-1:1:3 | 789 | Fructose-bisphosphate aldolase |
| T-SETit.Fba-1:1:4 | 790 | Fructose-bisphosphate aldolase |
| T-SETit.Gapdh-1:1:1 | 791 | Glyceraldehyde-3-phosphate |
| | | dehydrogenase |
| T-SETit.MES2_nno-1:1:1 | 792 | Methionine synthase 2 |
| T-SETit.Oep-1:1:1 | 793 | 33 kDa oxygen evolving protein |
| T-SETit.Pea-1:1:1 | 794 | Proton-exporting ATPase |
| T-SETit.Pod-1:1:1 | 795 | pyruvate orthophosphate dikinase |
| T-SETit.Ppc-1:1:1 | 796 | Phosphoenolpyruvate carboxylase |
| T-SETit.Psi-K-1:1:1 | 797 | Photosystem I reaction center subunit |
| T-SETit.Psi-L-1:1:1 | 798 | Photosystem I reaction center subunit |
| T-SETit.Rfe-s-1:1:1 | 799 | Rieske Fe-S |
| T-SETit.TubA-1:1:1 | 800 | Tubulin A |
| T-contig00388 | 801 | Root 3′ UTR |
| T-contig05482 | 802 | Root 3′ UTR |
| T-contig08555 | 803 | Root 3′ UTR |
| T-contig08556 | 804 | Root 3′ UTR |
| T-contig09485 | 805 | Root 3′ UTR |
| T-contig13749 | 806 | Root 3′ UTR |
| T-contig16157 | 807 | Root 3′ UTR |
| T-contig18936 | 808 | Root 3′ UTR |
| T-contig18994 | 809 | Root 3′ UTR |
| T-contig21387 | 810 | Root 3′ UTR |
| T-contig23385 | 811 | Root 3′ UTR |
| T-contig24188 | 812 | Root 3′ UTR |
| T-contig24188 | 813 | Root 3′ UTR |
| T-contig24832 | 814 | Root 3′ UTR |
| T-contig24890 | 815 | Root 3′ UTR |
| T-contig24916 | 816 | Root 3′ UTR |
| T-contig25097 | 817 | Root 3′ UTR |
| T-contig25509 | 818 | Root 3′ UTR |
| T-contig25584 | 819 | Root 3′ UTR |
| T-contig26532 | 820 | Root 3′ UTR |
| T-contig28013 | 821 | Root 3′ UTR |
| T-contig29922 | 822 | Root 3′ UTR |
| T-contig34261 | 823 | Root 3′ UTR |
| T-contig34311 | 824 | Root 3′ UTR |
| T-contig34749 | 825 | Root 3′ UTR |
| T-contig35408 | 826 | Root 3′ UTR |
| T-contig35550 | 827 | Root 3′ UTR |
| T-contig35785 | 828 | Root 3′ UTR |
| T-contig35943 | 829 | Root 3′ UTR |
| T-contig36050 | 830 | Root 3′ UTR |
| T-contig36266 | 831 | Root 3′ UTR |
| T-contig36378 | 832 | Root 3′ UTR |
| T-contig36502 | 833 | Root 3′ UTR |
| T-contig36728 | 834 | Root 3′ UTR |
| T-contig36811 | 835 | Root 3′ UTR |
| T-contig36883 | 836 | Root 3′ UTR |
| T-contig37316 | 837 | Root 3′ UTR |
| T-contig37476 | 838 | Root 3′ UTR |
| T-contig37510 | 839 | Root 3′ UTR |
| T-contig37704 | 840 | Root 3′ UTR |
| T-contig37883 | 841 | Root 3′ UTR |
| T-contig37920 | 842 | Root 3′ UTR |
| T-contig37959 | 843 | Root 3′ UTR |
| T-contig37976 | 844 | Root 3′ UTR |
| T-contig38003 | 845 | Root 3′ UTR |
| T-SETIT-28JUL09-CLUS3016_12 | 846 | Root 3′ UTR |
| T-10SETIT-28JUL09-CLUS1332_4 | 847 | Constitutive 3′ UTR |
| T-17SETIT-28JUL09-CLUS1910_15 | 848 | Constitutive 3′ UTR |
| T-7SETIT-28JUL09-CLUS2844_11 | 849 | Constitutive 3′ UTR |
| T-contig00006 | 850 | Constitutive 3′ UTR |
| T-contig00142 | 851 | Constitutive 3′ UTR |
| T-contig00191 | 852 | Constitutive 3′ UTR |
| T-contig00205 | 853 | Constitutive 3′ UTR |
| T-contig00242 | 854 | Constitutive 3′ UTR |
| T-contig00263 | 855 | Constitutive 3′ UTR |
| T-contig01883 | 856 | Constitutive 3′ UTR |
| T-contig02157 | 857 | Constitutive 3′ UTR |
| T-contig02856 | 858 | Constitutive 3′ UTR |
| T-contig02883 | 859 | Constitutive 3′ UTR |
| T-contig04253 | 860 | Constitutive 3′ UTR |
| T-contig05397 | 861 | Constitutive 3′ UTR |
| T-contig05720 | 862 | Constitutive 3′ UTR |
| T-contig10626 | 863 | Constitutive 3′ UTR |
| T-contig10874 | 864 | Constitutive 3′ UTR |
| T-contig11193 | 865 | Constitutive 3′ UTR |
| T-contig14970 | 866 | Constitutive 3′ UTR |
| T-contig26892 | 867 | Constitutive 3′ UTR |
| T-contig32186 | 868 | Constitutive 3′ UTR |
| T-contig32187 | 869 | Constitutive 3′ UTR |
| T-contig33439 | 870 | Constitutive 3′ UTR |
| T-contig33682 | 871 | Constitutive 3′ UTR |
| T-contig34270 | 872 | Constitutive 3′ UTR |
| T-contig34378 | 873 | Constitutive 3′ UTR |
| T-contig35132 | 874 | Constitutive 3′ UTR |
| T-contig35270 | 875 | Constitutive 3′ UTR |
| T-contig35388 | 876 | Constitutive 3′ UTR |
| T-contig35412 | 877 | Constitutive 3′ UTR |
| T-contig35488 | 878 | Constitutive 3′ UTR |
| T-contig35982 | 879 | Constitutive 3′ UTR |
| T-contig36384 | 880 | Constitutive 3′ UTR |
| T-contig36588 | 881 | Constitutive 3′ UTR |
| T-contig36702 | 882 | Constitutive 3′ UTR |
| T-contig36980 | 883 | Constitutive 3′ UTR |
| T-contig36992 | 884 | Constitutive 3′ UTR |
| T-contig36993 | 885 | Constitutive 3′ UTR |
| T-contig37025 | 886 | Constitutive 3′ UTR |
| T-contig37162 | 887 | Constitutive 3′ UTR |
| T-contig37351 | 888 | Constitutive 3′ UTR |
| T-contig37386 | 889 | Constitutive 3′ UTR |
| T-contig37448 | 890 | Constitutive 3′ UTR |
| T-contig37456 | 891 | Constitutive 3′ UTR |
| T-contig37638 | 892 | Constitutive 3′ UTR |
| T-contig37732 | 893 | Constitutive 3′ UTR |
| T-contig37897 | 894 | Constitutive 3′ UTR |
| T-contig37927 | 895 | Constitutive 3′ UTR |
| T-contig37962 | 896 | Constitutive 3′ UTR |
| T-contig37980 | 897 | Constitutive 3′ UTR |
| T-SETIT-28JUL09-CLUS11107_1 | 898 | Constitutive 3′ UTR |
| T-SETIT-28JUL09-CLUS11705_1 | 899 | Constitutive 3′ UTR |
| T-SETIT-28JUL09-CLUS11899_1 | 900 | Constitutive 3′ UTR |
| T-SETIT-28JUL09-CLUS12698_2 | 901 | Constitutive 3′ UTR |
| T-SETIT-28JUL09-CLUS13580_1 | 902 | Constitutive 3′ UTR |
| T-SETIT-28JUL09-CLUS1404_1 | 903 | Constitutive 3′ UTR |
| T-SETIT-28JUL09-CLUS14743_1 | 904 | Constitutive 3′ UTR |
| T-SETIT-28JUL09-CLUS181186_1 | 905 | Constitutive 3′ UTR |
| T-SETIT-28JUL09-CLUS19095_1 | 906 | Constitutive 3′ UTR |
| T-SETIT-28JUL09-CLUS1910_13 | 907 | Constitutive 3′ UTR |
| T-SETIT-28JUL09-CLUS1910_14 | 908 | Constitutive 3′ UTR |
| T-SETIT28JUL09CLUS1910_16 | 909 | Constitutive 3′ UTR |
| T-SETIT28JUL09CLUS1910_17 | 910 | Constitutive 3′ UTR |
| T-SETIT-28JUL09-CLUS1910_18 | 911 | Constitutive 3′ UTR |
| T-SETIT-28JUL09-CLUS1910_19 | 912 | Constitutive 3′ UTR |
| T-SETIT-28JUL09-CLUS2157_4 | 913 | Constitutive 3′ UTR |
| T-SETIT-28JUL09-CLUS2166_1 | 914 | Constitutive 3′ UTR |
| T-SETIT-28JUL09-CLUS243_3 | 915 | Constitutive 3′ UTR |
| T-SETIT-28JUL09-CLUS3485_1 | 916 | Constitutive 3′ UTR |
| T-SETIT-28JUL09-CLUS364_1 | 917 | Constitutive 3′ UTR |
| T-SETIT-28JUL09-CLUS36567_1 | 918 | Constitutive 3′ UTR |
| T-SETIT-28JUL09-CLUS42130_1 | 919 | Constitutive 3′ UTR |
| T-SETIT-28JUL09-CLUS52844_1 | 920 | Constitutive 3′ UTR |
| T-SETIT-28JUL09-CLUS7004_1 | 921 | Constitutive 3′ UTR |
| T-SETIT-28JUL09-CLUS83_23 | 922 | Constitutive 3′ UTR |
| T-SETIT-28JUL09-CLUS937_1 | 923 | Constitutive 3′ UTR |
| T-SETIT-28JUL09-CLUS95524_1 | 924 | Constitutive 3′ UTR |

[0199] The 3′ UTRs of the present invention, presented as SEQ ID NOS: 268 through 276 and SEQ ID NOS: 779 through 924 are tested in transient protoplast assays. A constitutive or other type promoter is used to drive expression of a transgene such as GUS. Plant vectors are constructed using methods known in the art in which a transgene cassette is used to test the properties of the 3′ UTR as well as provide transcript that can be analyzed to understand the effectiveness of the 3′ UTR in controlling expression of the transgene and processing of the resulting transcript.

[0200] For transient assay of the test 3′ UTR effectiveness, a base plant vector is constructed using methods known in the art. The 3′ UTR is cloned into a base plant vector which comprises a first transgene cassette to test the 3′ UTR comprised of, a constitutive promoter such as the Cauliflower mosaic virus promoter, P-CaMV.35S-enh-1:1:9 (SEQ ID NO: 1096), operably linked 5′ to a leader element, L-Ta.Lhcb1-1:1:1 (SEQ ID NO: 1114), operably linked to an intron derived from the HSP70 heat shock protein of Zea mays (I-Zm.DnaK-1:1:1, SEQ ID NO: 1102), operably linked to a coding sequence for B-glucuronidase (GUS) that either possessed a processable intron (GUS-2, SEQ ID NO: 1091) or no intron (GUS-1, SEQ ID NO: 1090), operably linked to the Nopaline synthase 3′ termination region from A. tumefaciens (T-AGRtu.nos-1:1:13, SEQ ID NO: 1088) or the 3′ termination region from the rice lipid transfer protein gene (T-Os.LTP-1:1:1, SEQ ID NO: 1089); a second transgene selection cassette used for selection of transformed plant cells that conferred resistance to the herbicide glyphosate (driven by the rice Actin 1 transcriptional regulatory element group, SEQ ID NO: 1098), or alternatively, the antibiotic kanamycin (driven by the rice Actin 1 transcriptional regulatory element group, SEQ ID NO: 1098) and a left border region from A. tumefaciens.

[0201] Several experimental observations are made to characterize the 3′ UTR in protoplast assay. For example, the level of expression is determined using GUS staining as described in previous examples to assess the amount of protein expressed and is normalized using methods known in the art to draw a comparison in protein expression levels of the test 3′ UTR relative to the T-AGRtu.nos control. Total RNA is extracted and probed on Northern blots with probes specific to the GUS coding sequence to assess the size or sizes of transcripts produced in the protoplast cells to determine the effectiveness of the 3′ UTR in terminating transcription. Alternatively, the sequence 3′ of the 3′ UTR can be used to prime amplification reactions from reverse transcribed RNA to detect transcripts in which read-through has occurred beyond the 3′ UTR. Total RNA probed on Northern blots can also reveal the relative abundance of transcript when compared to the T-AGRtu.nos control.

### Example 16. Assay of Transcriptional Termination Sequences or 3′ UTRs in Stable Plants

[0202] The 3′ UTRs, presented as SEQ ID NOS: 268 through 276 and SEQ ID NOS: 779 through 924 are tested in stably transformed corn plants. For stable plant assay of the 3′ UTR, a GUS expression plant transformation vector is constructed using methods known in the art similar to the constructs described in the previous examples. The 3′ UTR is cloned into a base plant vector which comprises a first transgene cassette to test the 3′ UTR comprised of, a constitutive promoter such as the Cauliflower mosaic virus promoter, P-CaMV.35S-enh-1:1:9 (SEQ ID NO: 1096), operably linked 5′ to a leader element, L-Ta.Lhcb1-1:1:1 (SEQ ID NO: 1114), or alternatively, a root promoter such as Lipid transfer protein promoter, P-Os.Rcc3-1:1:24 (SEQ ID NO: 1093), operably linked 5′ to the leader, L-Os.Rcc3-1:1:2 (SEQ ID NO: 1094), operably linked to an intron derived from the HSP70 heat shock protein of Zea mays (I-Zm.DnaK-1:1:1, SEQ ID NO: 1102), operably linked to a coding sequence for β-glucuronidase (GUS) that either possessed a processable intron (GUS-2, SEQ ID NO: 1091) or no intron (GUS-1, SEQ ID NO: 1090), operably linked to a test 3′ termination region; a second transgene selection cassette used for selection of transformed plant cells that conferred resistance to the herbicide glyphosate (driven by the rice Actin 1 transcriptional regulatory element group, SEQ ID NO: 1098), or alternatively, the antibiotic kanamycin (driven by the rice Actin 1 transcriptional regulatory element group, SEQ ID NO: 1098) and a left border region from A. tumefaciens.

[0203] The resulting plasmids are used to transform corn plants. Single-copy or low copy number transformants are selected for comparison to single-copy or low copy number transformed plants, transformed with a plant transformation vector identical to the test vector but comprising a well characterized 3′ UTR, such as the Nopaline synthase 3′ termination region from A. tumefaciens (T-AGRtu.nos-1:1:13, SEQ ID NO: 1088) operably linked to the GUS transgene.

[0204] Corn plants are transformed as described above or by Agrobacterium-mediated transformation methods known in the art. Tissue is harvested at different time points of development and from different organs and assayed for GUS activity to assess the amount of protein expressed in each tissue at different time windows of development and is compared to expression of GUS in control transformed plants. Total RNA is extracted from the different tissues of interest and probed on Northern blots with probes specific to the GUS coding sequence to assess the size or sizes of transcripts produced within each of the selected tissues to determine the effectiveness of the 3′ UTR in terminating transcription and the relative abundance of message in each selected tissue. Alternatively, the sequence 3′ of the 3′ UTR can be used to prime amplification reactions from reverse transcribed RNA to detect transcripts in which read-through has occurred beyond the 3′ UTR or assess the amount of transcript expressed in each tissue. The most useful and effective 3′ UTRs are selected for use in transgene cassettes in which genes of agronomic importance are expressed.

### Example 17: Analysis of 3′ UTR-Mediated Enhancement of GUS Activity In Transgenic Corn Plants

[0205] Plant binary vectors are constructed using methods known in the art similar to those described in the previous example and used to transform corn plants to test the effectiveness of selected 3′ UTRs.

[0206] Plant transformation vectors are used to transform corn plants to test the effectiveness in controlling expression of the GUS transgene, when driven by either a constitutive promoter, (P-FMV.35S-enh-1:1:1 (SEQ ID NO: 1115)+L-Ta.Lhcb1-1:1:1 (SEQ ID NO: 1114)) or an enhanced root promoter, ((E-CaMV.35S-enh-1:1:1 (SEQ ID NO: 1116)+P-Os.Rcc3-1:1:24 (SEQ ID NO: 1093)+L-Os.Rcc3-1:1:2 (SEQ ID NO: 1094)). The resulting plant expression vectors contains a right border region from Agrobacterium tumefaciens, a first transgene cassette to test the 3′ UTR comprised of a either a constitutive promoter, (P-FMV.35S-enh-1:1:1 (SEQ ID NO: 1115)+L-Ta.Lhcb1-1:1:1 (SEQ ID NO: 1114)) or an enhanced root promoter, ((E-CaMV.35S-enh-1:1:1 (SEQ ID NO: 1116)+P-Os.Rcc3-1:1:24 (SEQ ID NO: 1093)+L-Os.Rcc3-1:1:2 (SEQ ID NO: 1094)), operably linked 5′ to a coding sequence for β-glucuronidase (GUS) that possesses a processable intron (GUS-2, SEQ ID NO: 1091) operably linked to the test 3′ UTR; a second transgene selection cassette used for selection of transformed plant cells that confers resistance to the herbicide glyphosate (driven by the rice Actin 1 promoter), and a left border region from A. tumefaciens. Table 24 below shows the test constructs and the corresponding promoter and 3′ UTR.

TABLE 24
Transcriptional termination or 3′ UTR test constructs in which GUS is
driven either by a constitutive promoter or an enhanced root promoter.

| | | Enhanced Root |
|---|---|---|
| | | Constructs |
| | Constitutive | E-CaMV.35S-enh- |
| | Constructs | 1:1:1 |
| | P-FMV.35S-enh- | (SEQ ID NO: 1116) |
| | 1:1:1 | P-Os.Rcc3-1:1:24 |
| | (SEQ ID NO: 1115) | (SEQ ID NO: 1093) |
| | L-Ta.Lhcb1-1:1:1 | L-Os.Rcc3-1:1:2 |
| Test 3′ UTR | (SEQ ID NO: 1114) | (SEQ ID NO: 1094) |
| T-SETit.Ntr-1:1:1 (SEQ ID | pMON126964 | pMON126965 |
| NO: 275) | | |
| T-SETit.Sus2-1:1:1 (SEQ | pMON126966 | pMON126967 |
| ID NO: 276) | | |
| T-SETit.Ctpt-1:1:2 (SEQ | pMON126968 | pMON126969 |
| ID NO: 271) | | |
| T-SETit.Fnr-1:1:1 (SEQ ID | pMON126974 | pMON126975 |
| NO: 273) | | |
| T-SETit.Mes2-1:1:1 (SEQ | pMON126976 | pMON126977 |
| ID NO: 274) | | |
| T-SETit.Fba-1:1:1 (SEQ | pMON126978 | pMON126979 |
| ID NO: 272) | | |
| T-SETit.Act8-1:1:1 (SEQ | pMON127033 | |
| ID NO: 269) | | |
| T-SETit.Act1-1:1:1 (SEQ | pMON127035 | |
| ID NO: 268) | | |
| T-SETit. Ams1-1:1:1 (SEQ | pMON127041 | |
| ID NO: 270) | | |

[0207] Corn plants are transformed using Agrobacterium-mediated methods known in the art and as described in the previous examples. Transformed corn plants are assayed for GUS activity as described in the previous examples. Tables 25 and 26 show the average level of GUS expression observed in various tissues isolated from the transformed plants in which the constitutive promoter, ((P-FMV.35S-enh-1:1:1 (SEQ ID NO: 1115)+L-Ta.Lhcb1-1:1:1 (SEQ ID NO: 1114)), drove expression of the GUS transgene. Tables 27 and 28 show the average level of GUS expression observed in tissues isolated from the transformed plants in which the enhanced root promoter, ((E-CaMV.35S-enh-1:1:1 (SEQ ID NO: 1116)+P-Os.Rcc3-1:1:24 (SEQ ID NO: 1093)+L-Os.Rcc3-1:1:2 (SEQ ID NO: 1094)), drove expression of the GUS transgene. Enhancement of expression imparted by the 3′ UTR is inferred by the relative comparison amongst the constructs transformed comprising each UTR and specific promoter.

TABLE 25
Average Ro GUS expression of a constitutive promoter driving GUS with
different 3′ UTRs.

| | 3′ UTR | V3 | V7 | VT | V3 | V7 | VT |
|---|---|---|---|---|---|---|---|
| Construct | Annotation | Root | Root | Root | Leaf | Leaf | Leaf |
| pMON126964 | T-SETit.Ntr-1:1:1 | 45.54 | 136.70 | 103.51 | 112.24 | 151.17 | 304.15 |
| | (SEQ ID NO: 275) | | | | | | |
| pMON126966 | T-SETit.Sus2-1:1:1 | 12.01 | nd | 123.25 | 33.30 | 140.51 | 100.88 |
| | (SEQ ID NO: 276) | | | | | | |
| pMON126968 | T-SETit.Ctpt-1:1:2 | 9.76 | nd | 108.38 | 231.03 | 417.04 | 157.53 |
| | (SEQ ID NO: 271) | | | | | | |
| pMON126974 | T-SETit.Fnr-1:1:1 | 7.74 | nd | 53.30 | 163.74 | 357.60 | 456.63 |
| | (SEQ ID NO: 273) | | | | | | |
| pMON126976 | T-SETit.Mes2-1:1:1 | nd | nd | 454.44 | 235.62 | 268.63 | 235.73 |
| | (SEQ ID NO: 274) | | | | | | |
| pMON126978 | T-SETit.Fba-1:1:1 | nd | 158.85 | 45.89 | 60.97 | 250.87 | 121.41 |
| | (SEQ ID NO: 272) | | | | | | |
| pMON127033 | T-SETit.Act8-1:1:1 | nd | nd | 203.77 | 129.06 | 240.13 | 460.74 |
| | (SEQ ID NO: 269) | | | | | | |
| pMON127035 | T-SETit.Act1-1:1:1 | 117.02 | 174.21 | 557.50 | 412.92 | 511.88 | 531.34 |
| | (SEQ ID NO: 268) | | | | | | |
| pMON127041 | T-SETit.Ams1- | 842.04 | 564.84 | 246.90 | 986.33 | 225.68 | 279.58 |
| | 1:1:1 (SEQ ID NO: | | | | | | |
| | 270) | | | | | | |

[0208] The average expression of the GUS gene was effected by different 3′ UTRs. GUS expression driven by the constitutive promoter appeared to be affected by the use of different 3′ UTRs, particularly with respect to leaf expression. An enhancement of leaf expression at V3 and V7 stage could be seen when the 3′ UTR, T-SETit.Ctpt-1:1:2 (SEQ ID NO: 271) was used in combination with the constitutive promoter. Enhancement was provided for all 3 leaf stages when combining the constitutive promoter with the 3′ UTRs, T-SETit.Mes2-1:1:1 (SEQ ID NO: 274), T-SETit.Act1-1:1:1 (SEQ ID NO: 268) and T-SETit.Ams1-1:1:1 (SEQ ID NO: 270). Enhancement of expression in the root using the constitutive promoter was observed through out all 3 stages using the 3′ UTR, T-SETit.Ams1-1:1:1 (SEQ ID NO: 270) and at VT stage using the 3′ UTRs, T-SETit.Mes2-1:1:1 (SEQ ID NO: 274), T-SETit.Act8-1:1:1 (SEQ ID NO: 269) and T-SETit.Act1-1:1:1 (SEQ ID NO: 268).

TABLE 26
Average Ro GUS expression of a constitutive promoter driving GUS with different
3′ UTRs.

| | | | | 21 | 21 |
|---|---|---|---|---|---|
| Construct | 3′ UTR Annotation | VT Anther | VT Silk | DAP Embryo | DAP Endosperm |
| pMON126964 | T-SETit.Ntr-1:1:1 | 140.38 | 96.86 | 36.85 | 139.47 |
| | (SEQ ID NO: 275) | | | | |
| pMON126966 | T-SETit.Sus2-1:1:1 | 166.05 | 110.71 | 275.98 | 223.52 |
| | (SEQ ID NO: 276) | | | | |
| pMON126968 | T-SETit.Ctpt-1:1:2 | 219.71 | 101.88 | 72.49 | 235.36 |
| | (SEQ ID NO: 271) | | | | |
| pMON126974 | T-SETit.Fnr-1:1:1 | 350.21 | 419.08 | 107.48 | 243.22 |
| | (SEQ ID NO: 273) | | | | |
| pMON126976 | T-SETit.Mes2-1:1:1 | 401.38 | 370.21 | 174.26 | 366.92 |
| | (SEQ ID NO: 274) | | | | |
| pMON126978 | T-SETit.Fba-1:1:1 | 41.62 | 59.81 | 115.59 | 168.81 |
| | (SEQ ID NO: 272) | | | | |
| pMON127033 | T-SETit.Act8-1:1:1 | 324.04 | 435.63 | 133.10 | 262.52 |
| | (SEQ ID NO: 269) | | | | |
| pMON127035 | T-SETit.Act1-1:1:1 | 408.61 | 707.00 | 119.39 | 419.52 |
| | (SEQ ID NO: 268) | | | | |
| pMON127041 | T-SETit.Ams1-1:1:1 | 346.60 | 246.92 | 134.79 | 251.23 |
| | (SEQ ID NO: 270) | | | | |

[0209] Enhancement of GUS expression in the anther and pollen when using a constitutive promoter could be observed for the 3′ UTRs, T-SETit.Fnr-1:1:1 (SEQ ID NO: 273), T-SETit.Mes2-1:1:1 (SEQ ID NO: 274), T-SETit.Act8-1:1:1 (SEQ ID NO: 269), T-SETit.Act1-1:1:1 (SEQ ID NO: 268) and T-SETit.Ams1-1:1:1 (SEQ ID NO: 270). Enhancement of GUS expression in the endosperm when using a constitutive promoter could be observed for the 3′ UTR, T-SETit.Sus2-1:1:1 (SEQ ID NO: 276). Enhancement of GUS expression in the embryo when using a constitutive promoter could be observed in most of the 3′ UTRs relative to the lowest expressor, T-SETit.Ntr-1:1:1 (SEQ ID NO: 275). The greatest amount of enhancement in embryo was observed using the 3′ UTRs, T-SETit.Mes2-1:1:1 (SEQ ID NO: 274) and T-SETit.Act1-1:1:1 (SEQ ID NO: 268).

[0210] Readthrough was assessed using PCR methods known in the art. Those 3′ UTRs demonstrating some readthrough in assay were T-SETit.Ntr-1:1:1 (SEQ ID NO: 275), T-SETit.Sus2-1:1:1 (SEQ ID NO: 276), T-SETit.Ctpt-1:1:2 (SEQ ID NO: 271), T-SETit.Mes2-1:1:1 (SEQ ID NO: 274) and T-SETit.Act1-1:1:1 (SEQ ID NO: 268). Those 3′ UTRs in which readthrough was not observed were T-SETit.Fnr-1:1:1 (SEQ ID NO: 273), T-SETit.Fba-1:1:1 (SEQ ID NO: 272), T-SETit.Act8-1:1:1 (SEQ ID NO: 269) and T-SETit.Ams1-1:1:1 (SEQ ID NO: 270).

TABLE 27
Average Ro GUS expression of an enhanced root promoter driving GUS
with different 3′ UTRs.

| | | V3 | V7 | VT | V3 | V7 | VT |
|---|---|---|---|---|---|---|---|
| Construct | 3′ UTR Annotation | Root | Root | Root | Leaf | Leaf | Leaf |
| pMON126965 | T-SETit.Ntr-1:1:1 | 7.86 | 11.39 | 8.34 | 0.00 | 5.60 | 8.89 |
| | (SEQ ID NO: 275) | | | | | | |
| pMON126967 | T-SETit.Sus2-1:1:1 | 67.45 | 44.80 | 8.98 | 0.00 | 0.00 | 0.00 |
| | (SEQ ID NO: 276) | | | | | | |
| pMON126969 | T-SETit.Ctpt-1:1:2 | 35.07 | 28.96 | 6.28 | 7.44 | 5.07 | 0.00 |
| | (SEQ ID NO: 271) | | | | | | |
| pMON126975 | T-SETit.Fnr-1:1:1 | 45.53 | 12.99 | 10.67 | 81.88 | 0.00 | 0.00 |
| | (SEQ ID NO: 273) | | | | | | |
| pMON126977 | T-SETit.Mes2-1:1:1 | 16.64 | 50.03 | 23.55 | 0.00 | 20.47 | 0.00 |
| | (SEQ ID NO: 274) | | | | | | |
| pMON126979 | T-SETit.Fba-1:1:1 | 30.95 | 19.79 | 14.22 | 0.00 | 7.47 | 0.00 |
| | (SEQ ID NO: 272) | | | | | | |

[0211] Using an enhanced root promoter, enhancement in root at V3 and V7 stage was observed using the 3′ UTR, T-SETit.Sus2-1:1:1 (SEQ ID NO: 276). Slight enhancement of root expression could also be observed when using the 3′ UTRs, T-SETit.Ctpt-1:1:2 (SEQ ID NO: 271) (V3 and V7 stage), T-SETit.Fnr-1:1:1 (SEQ ID NO: 273) (V3 stage) and T-SETit.Fba-1:1:1 (SEQ ID NO: 272) (V3 stage). An enhancement of leaf expression was observed when using the enhanced root promoter in combination with T-SETit.Fnr-1:1:1 (SEQ ID NO: 273).

TABLE 28
Average R₀ GUS expression of an enhanced root promoter driving
GUS with different 3′ UTRs.

| | | | | | 21 DAP |
|---|---|---|---|---|---|
| | | VT | VT | 21 DAP | Endo- |
| Construct | 3′ UTR Annotation | Anther | Silk | Embryo | sperm |
| pMON126965 | T-SETit.Ntr-1:1:1 | 6.59 | 5.16 | 0.00 | 0.00 |
| | (SEQ ID NO: 275) | | | | |
| pMON126967 | T-SETit.Sus2-1:1:1 | 12.24 | 0.00 | 115.97 | 21.68 |
| | (SEQ ID NO: 276) | | | | |
| pMON126969 | T-SETit.Ctpt-1:1:2 | 0.00 | 0.00 | 7.20 | 10.77 |
| | (SEQ ID NO: 271) | | | | |
| pMON126975 | T-SETit.Fnr-1:1:1 | 5.71 | 12.57 | 7.60 | 0.00 |
| | (SEQ ID NO: 273) | | | | |
| pMON126977 | T-SETit.Mes2-1:1:1 | 7.28 | 0.00 | 0.00 | 5.18 |
| | (SEQ ID NO: 274) | | | | |
| pMON126979 | T-SETit.Fba-1:1:1 | 11.25 | 0.00 | 0.00 | 8.38 |
| | (SEQ ID NO: 272) | | | | |

[0212] Enhancement of expression in the embryo was observed for the 3′ UTR, T-SETit.Sus2-1:1:1 (SEQ ID NO: 276) when combined with the enhanced root promoter. The 3′ UTR elements presented above each had an effect on expression of GUS when combined in operable linkage with ether a constitutive promoter or an enhanced root promoter.

### Example 18. Identification and Assay of Chloroplast Transit Peptides (CTPs)

[0213] It is well known that the cells of eukaryotic organisms, and more particularly plant cells, contain distinct sub-cellular compartments, or organelles, delimited by characteristic membrane systems and performing specialized functions within the cell. In photosynthetic leaf cells of higher plants the most conspicuous organelles are the chloroplasts, which exist in a semi-autonomous fashion within the cell, containing their own genetic system and protein synthesis machinery, but relying upon a close cooperation with the nucleo-cytoplasmic system in their development and biosynthetic activities.

[0214] Most chloroplast proteins are coded for in the nuclear DNA and are the products of protein synthesis on cytoplasmic ribosomes, many as soluble higher molecular weight precursors. These precursors are then translocated through either one or both of the plastid envelope membranes, processed, and assembled into their final organellar compartment or holoenzyme complex. In vitro reconstitution experiments using isolated chloroplasts, have demonstrated that the uptake and processing of over one hundred nuclear-encoded, cytoplasmically synthesized precursors by chloroplasts occurs by an energy-dependent, post-translational mechanism.

[0215] The most extensively characterized of these nuclear-encoded chloroplast proteins is the small subunit of ribulose-1,5-bisphosphate (RuBP) carboxylase. This polypeptide is synthesized on free cytoplasmic ribosomes as a precursor of 20,000 daltons containing an amino terminal extension or transit peptide of approximately 5-6,000 daltons. During or immediately after import of the precursor into the chloroplast, the transit peptide is proteolytically removed in two steps by a soluble protease, yielding a mature small subunit polypeptide of 15,000 daltons. This polypeptide is then assembled with an endogenous large subunit into the functional RuBP carboxylase holoenzyme.

[0216] These different properties of the transit peptides are at the basis of the recombinant DNAs, more particularly recombinant vectors including a DNA sequence coding for a determined protein or polypeptide, particularly a foreign protein, sought to be introduced and processed in chloroplasts, as well as the processes for the introduction of such foreign polypeptide or protein into the chloroplasts, for instance in the thylacoid membranes or, preferably, in the stroma thereof.

[0217] Chloroplast transit peptides (CTPs) are isolated from S. italica based upon an analysis of EST cluster sequences and homology to known plastid targeted molecules. Clusters of EST sequences are used to deduce the coding sequence of chloroplast targeted protein molecules. A fragment derived from the 5′ end of the coding sequence of the deduced chloroplast targeted molecule is cloned using methods known in the art to produce a chimeric molecule in which a coding sequence encoding a non-chloroplast targeted molecule is fused in frame at the 5′ end with a DNA fragment encoding the putative transit peptide sequence and cloned into a plant expression vector to determine the ability and efficiency of the putative CTP to cause importation of the chimeric molecule into the chloroplast and subsequent processing of the transit peptide sequence into the mature, processed protein.

[0218] Translated S. italica EST sequence clusters are compared with DNA sequences encoding known plastid targeted molecules from monocots such as corn, sorghum and rice to determine the completeness of the cluster coding sequence and deduce the potential N-terminal amino acid sequence that will be useful as a transit peptide coding sequence. In some instances, the 5′ most portion of the S. italica EST cluster is absent. In those conditions, a degenerative oligo is designed based upon an alignment of sorghum and rice coding sequences, encoding homologs to the S. italica protein coding sequence to facilitate amplification of the unknown 5′ sequence.

[0219] Sequences encoding plastid targeted proteins useful in isolating and cloning S. italica CTPs are presented as SEQ ID NOS: 1034 through 1060. Protein sequences representing plastid targeted peptides useful in identification of S. italica CTPs are presented as 1061 through 1087. Nucleotide sequences encoding transit peptides shown in Table 29 below are presented as SEQ ID NOS: 277 through 284, 289 through 293, 296, 301 through 304 and 307 through 316. Protein sequences of the encoded transit peptides are presented as SEQ ID NOS: 324 through 350.

[0220] Constructs for use in cloning the transit peptides and sequences encoding the transit peptide as well as the transit peptide sequence IDs are presented in Table 29 below.

TABLE 29
Plasmid constructs for use in cloning chloroplast transit peptides and
associated protein and nucleotide coding sequences.

| | | Protein | Nucleotide | |
|---|---|---|---|---|
| | | SEQ ID | SEQ ID | |
| Construct | Annotation | NO: | NO: | Description |
| pMON136303 | GOI-TS-APX | 325 | 277 | Ascorbate Peroxidase |
| pMON139282 | GOI-TS-APX:1:2 | 325 | 278 | Ascorbate Peroxidase |
| pMON139283 | GOI-TS-APX2:1:1 | 326 | 279 | Ascorbate Peroxidase |
| pMON139281 | GOI-TS-CNT:1:2 | 332 | 280 | 2-C-methyl-D- |
| | | | | erythritol 4-phosphate |
| | | | | cytidylyltransferase |
| pMON139291 | GOI-TS-DHDPS:1:2 | 334 | 281 | Dihydrodipicolinate |
| | | | | synthase precursor, |
| | | | | chloroplastic |
| pMON139288 | GOI-TS-Fe-SD:1:1 | 335 | 282 | Iron- |
| | | | | superoxidedismutases, |
| | | | | chloroplastic |
| pMON139287 | GOI-TS-PPR:1:1 | 340 | 283 | Pentatricopeptide |
| | | | | repeat-containing |
| | | | | protein, putative |
| pMON139276 | TS-SETit.APG6-1:1:1 | 324 | 284 | Casein lytic |
| | | | | proteinase B3 heat |
| | | | | shock protein-like |
| pMON139284 | TS-SETit.APX3-1:1:1 | 327 | 289 | Ascorbate Peroxidase |
| pMON139278 | TS-SETit.ASA2-1:1:1 | 328 | 290 | Anthranilate Synthase |
| | | | | alpha 2 subunit |
| pMON139285 | TS-SETit.CC10-1:1:1 | 329 | 291 | Chloroplast |
| | | | | Chaperonin 10 Kd |
| | | | | subunit |
| pMON136299 | TS-SETit.CHoR1- | 330 | 292 | Calcium homeostasis |
| | 1:1:1 | | | regulator |
| pMON139280 | TS-SETit.ClpD-1:1:1 | 331 | 293 | ATP-dependent Clp |
| | | | | protease ATP-binding |
| | | | | subunit |
| pMON136296 | TS-SETit.CR88-1:1:1 | 333 | 296 | Heat-shock protein |
| | | | | putative |
| pMON139290 | TS-SETit.G-typA- | 336 | 301 | GTP-binding protein |
| | 1:1:1 | | | typA |
| pMON136301 | TS-SETit.HDh-1:1:1 | 337 | 302 | Haloacid |
| | | | | dehalogenase-like |
| | | | | hydrolase |
| pMON139289 | TS-SETit.IMP-1:1:1 | 338 | 303 | Inositol-1- |
| | | | | monophosphatase, |
| | | | | putative, chloroplastic |
| pMON136297 | TS-SETit.MDH-1:1:1 | 339 | 304 | Putative NAD-malate |
| | | | | dehydrogenase |
| pMON136302 | TS-SETit.PSPR-3- | 341 | 307 | Plastid-specific 30S |
| | 1:1:1 | | | ribosomal protein 3 |
| pMON136291 | TS-SETit.RbcS_1- | 342 | 308 | Small subunit |
| | 1:1:1 | | | RUBISCO |
| pMON136292 | TS-SETit.RbcS_2- | 343 | 309 | Small subunit |
| | 1:1:1 | | | RUBISCO |
| pMON136293 | TS-SETit.RbcS_3- | 344 | 310 | Small subunit |
| | 1:1:1 | | | RUBISCO |
| pMON136294 | TS-SETit.RbcS_4- | 345 | 311 | Small subunit |
| | 1:1:1 | | | RUBISCO |
| pMON139277 | TS-SETit.ShkG-1:1:1 | 346 | 312 | 5- |
| | | | | enolpyruvylshikimate- |
| | | | | 3-phosphate synthase |
| | | | | precursor |
| pMON139286 | TS-SETit.SRP43-1:1:1 | 347 | 313 | Signal recognition |
| | | | | particle 43 kDa |
| | | | | protein, chloroplastic |
| pMON139279 | TS-SETit.TDh-1:1:1 | 348 | 314 | Threonine |
| | | | | dehydratase |
| | | | | biosynthetic, |
| | | | | chloroplast precursor |
| pMON136304 | TS-SETit.ThR-1:1:1 | 349 | 315 | Thioredoxin |
| pMON136287 | TS-SETit.Wx1-1:1:1 | 350 | 316 | Putative granule |
| | | | | bound starch synthase |

[0221] The transit peptide encoding sequences presented as SEQ ID NOS: 325, 326, 332, 334, 335 and 340 are derived and cloned from DNA sequences comprising a processable intron. The plasmids construct pMON136303 is comprised of the transit peptide encoding sequence, GOI-TS-APX, presented as SEQ ID NO: 277, which is further comprised of the element, TS-SETit.APX.ex1-1:1:1 (SEQ ID NO: 286), operably linked 5′ to the intron element, I-SETit.APX-1:1:1 (SEQ ID NO: 318), operably linked 5′ to the element, TS-SETit.APX.ex2-1:1:2 (SEQ ID NO: 287). The plasmids construct pMON139282 is comprised of the transit peptide encoding sequence, GOI-TS-APX:1:2, presented as SEQ ID NO: 278, which is further comprised of the element, TS-SETit.APX.ex1-1:1:1 (SEQ ID NO: 286), operably linked 5′ to the intron element, I-SETit.APX-1:1:2 (SEQ ID NO: 319), operably linked 5′ to the element, TS-SETit.APX.ex2-1:1:2 (SEQ ID NO: 287). The plasmids construct pMON139283 is comprised of the transit peptide encoding sequence, GOI-TS-APX2:1:1, presented as SEQ ID NO: 279, which is further comprised of the element, TS-SETit.APX.2.ex1-1:1:1 (SEQ ID NO: 285), operably linked 5′ to the intron element, I-SETit.APX.2-1:1:1 (SEQ ID NO: 317), operably linked 5′ to the element, TS-SETit.APX2.ex2-1:1:1 (SEQ ID NO: 288). The plasmids construct pMON139281 is comprised of the transit peptide encoding sequence, GOI-TS-CNT:1:2, presented as SEQ ID NO: 280, which is further comprised of the element, TS-SETit.CNT.ex1-1:1:1 (SEQ ID NO: 294), operably linked 5′ to the intron element, I-SETit.CNT.1-1:1:1 (SEQ ID NO: 320), operably linked 5′ to the element, TS-SETit.CNT.ex2-1:1:2 (SEQ ID NO: 295). The plasmids construct pMON139291 is comprised of the transit peptide encoding sequence, GOI-TS-DHDPS:1:2, presented as SEQ ID NO: 281, which is further comprised of the element, TS-SETit.DHDPS.Ex1-1:1:1 (SEQ ID NO: 297), operably linked 5′ to the intron element, I-SETit.DHDPS_1-1:1:1 (SEQ ID NO: 321), operably linked 5′ to the element, TS-SETit.DHDPS.Ex2-1:1:1 (SEQ ID NO: 298). The plasmids construct pMON139288 is comprised of the transit peptide encoding sequence, GOI-TS-Fe-SD:1:1, presented as SEQ ID NO: 282, which is further comprised of the element, TS-SETit.Fe-SD.ex1-1:1:1 (SEQ ID NO: 299), operably linked 5′ to the intron element, I-SETit.Fe-SD-1:1:1 (SEQ ID NO: 322), operably linked 5′ to the element, TS-SETit.Fe-SD.ex2-1:1:1 (SEQ ID NO: 300). The plasmids construct pMON139287 is comprised of the transit peptide encoding sequence, GOI-TS-PPR:1:1, presented as SEQ ID NO: 283, which is further comprised of the element, TS-SETit.PPR.ex1-1:1:1 (SEQ ID NO: 305), operably linked 5′ to the intron element, I-SETit.PPR-1:1:2 (SEQ ID NO: 323), operably linked 5′ to the element, TS-SETit.PPR.ex2-1:1:2 (SEQ ID NO: 306).

[0222] Isolated coding sequences encoding S. italica CTPs are tested using plant vectors designed for use in either transient protoplast or stable transformation plant assays. DNA fragments encoding the CTP are cloned in frame with a GUS coding sequence using methods known in the art. A plant transformation vector is constructed using methods known in the art and is comprised in a similar manner as the plant vectors described in the previous examples. The expression cassette used to test the CTP is comprised of a constitutive promoter such as the Cauliflower mosaic virus promoter, P-CaMV.35S-enh-1:1:9 (SEQ ID NO: 1096), operably linked 5′ to a leader element, L-Ta.Lhcb1-1:1:1 (SEQ ID NO: 1097), operably linked 5′ to a coding sequence for GFP in which the test CTP is fused in frame at the 5′ end of the GFP coding sequence to enable translation of a chimeric CTP-GFP molecule, operably linked to the Nopaline synthase 3′ termination region from A. tumefaciens (T-AGRtu.nos-1:1:13, SEQ ID NO: 1088). For stable plant transformation, a second transgene selection cassette used for selection of transformed plant cells that confers resistance to the herbicide glyphosate (driven by the rice Actin 1 promoter) is cloned adjacent to the CTP test transgene cassette. The two transgene cassettes are flanked at the by a right border and left border region from Agrobacterium tumefaciens to allow for stable integration of both transgene cassettes in the plant cell genome.

[0223] For transient assay testing of the CTP, protoplast cells are transformed with the plant plasmid construct comprising the CTP test transgene cassette. Transformed protoplast cells are observed using microscopy and fluorescence to determine the relative amount of GFP protein present in the chloroplast and in the cytosol. An effective CTP will cause most GFP fluorescence to appear in the chloroplast stroma or thylacoid, depending upon the type of CTP chosen. Protein is isolated and electrophoresed on polyacrylamide gels and stained using standard methods and compared with a non-plastid targeted GFP protein standard to determine if proper processing of the transit peptide has occurred.

[0224] For stable plant transformation, corn plants are transformed as described above by using Agrobacterium-mediated transformation methods known in the art. Tissues are harvested from the developing transformants and viewed microscopically with fluorescence to determine the relative amounts of GFP protein in the chloroplast and cytosol. Protein is isolated and electrophoresed on polyacrylamide gels and stained using standard methods and compared with a non-plastid targeted GFP protein standard to determine if proper processing of the transit peptide has occurred.

[0225] Having illustrated and described the principles of the present invention, it should be apparent to persons skilled in the art that the invention can be modified in arrangement and detail without departing from such principles. We claim all modifications that are within the spirit and scope of the claims. All publications and published patent documents cited herein are hereby incorporated by reference to the same extent as if each individual publication or patent application is specifically and individually indicated to be incorporated by reference.

1. A DNA molecule comprising a DNA sequence selected from the group consisting of:
a) a sequence with at least 85 percent sequence identity to SEQ ID NO:233;
b) a sequence comprising SEQ ID NO:233; and
c) a fragment of SEQ ID NO:233, wherein the fragment has gene-regulatory activity;
wherein said sequence is operably linked to a heterologous transcribable polynucleotide molecule.

2. The DNA molecule of claim 1, wherein said sequence has at least 90 percent sequence identity to the DNA sequence of SEQ ID NO:233.

3. The DNA molecule of claim 1, wherein said sequence has at least 95 percent sequence identity to the DNA sequence of SEQ ID NO:233.

4. The DNA molecule of claim 1, wherein the DNA sequence comprises a regulatory element.

5. The DNA molecule of claim 1, wherein the heterologous transcribable polynucleotide molecule comprises a gene of agronomic interest.

6. The DNA molecule of claim 1, wherein the heterologous transcribable polynucleotide molecule comprises a gene capable of providing herbicide resistance in plants.

7. The DNA molecule of claim 1, wherein the transcribable polynucleotide molecule comprises a gene capable of providing plant pest control in plants.

8. A transgenic plant cell comprising a DNA construct comprising a sequence selected from the group consisting selected from the group consisting of:
a) a sequence with at least 85 percent sequence identity to SEQ ID NO:233;
b) a sequence comprising SEQ ID NO:233; and
c) a fragment of SEQ ID NO:233, wherein the fragment has gene-regulatory activity;
wherein said sequence is operably linked to a heterologous transcribable polynucleotide molecule.

9. The transgenic plant cell of claim 8, wherein said transgenic plant cell is a monocotyledonous plant cell.

10. The transgenic plant cell of claim 8, wherein said transgenic plant cell is a dicotyledonous plant cell.

11. A transgenic plant, or part thereof, comprising the DNA molecule of claim 1.

12. A progeny plant of the transgenic plant of claim 11, or a part thereof, wherein the progeny plant or part thereof comprises said DNA molecule.

13. A transgenic seed, wherein the seed comprises the DNA molecule of claim 1.

14.-21. (canceled)

The application's sequence listing, which the Patent Office published only in electronic form, follows.

SEQUENCE LISTING (1117 sequences)

SEQ ID NO: 1 - DNA, 1752 bp, Setaria italica
  source 1..1752: mol_type = genomic DNA
aattctcagtccaaagcctcaacaaggtcagggtacagagtctccaaaccattagccaaaagctacaggagatcaatgaagaatcttcaatcaaagtaaactactgttccagcacatgcatcatggtcagtaagtttcagaaaaagacatccaccgaagacttaaagttagtgggcatctttgaaagtaatcttgtcaacatcgagcagctggcttgtggggaccagacaaaaaaggaatggtgcagaattgttaggcgcacctaccaaaagcatctttgcctttattgcaaagataaagcagattcctctagtacaagtggggaacaaaataacgtggaaaagagctgtcctgacagcccactcactaatgcgtatgacgaacgcagtgacgaccacaaaagaattagcttgagctcaggatttagcagcattccagattgggttcaatcaacaaggtacgagccatatcactttattcaaattggtatcgccaaaaccaagaaggaactcccatcctcaaaggtttgtaaggaagcgtttaatcatattttcttcgttccgttccgacaccaaaagcgagagttgatgatagctgggcgatgcttgtgccttgtgcgtttggctgggcctggtgcgccggcgtgcagatcggaggagggcgttgcgtgcccgcggcacgtatgcaacagcaacgcaaatggagccccgacagcgccgtgtatgcttgcacccaacgtctcgacgaccacgcggcacggcacgcaaaaaatctggccccggcctctgtcgcacagatctgtccaacatctcctgttcgtatgatccccctcgtgaatgcgatgcttgctaacactaaataaggtttcccctttttcctttttgcggggaaaagaattgaatgtttccctttgaaccgtgcacgccgcactgatccagccctgctcaccgggactaaaatatcgtcgccggctgactttacactacacccacccacccgtcgaccatcgccatcgacgaggtaaacagcaaagcaaaagataatcccggcctccaaacgcgtcatcggccacttgggcttgggccactcgcagggaaaaatcgtgccgaatccacatcgaccctcctatttgctattcctaccgtgcccgcgccttcgctgaacgtctcctaccccctgcgcttcttggaacgaccgcaccaacaccagagcaagggcgcagccactggccacttgttacgcaaaagaatcctatccacgacaggcggatcggggagtgggtaggtcgcggcaggtggcggtggcggtggtaggaatgaaccccgggatcgtgcgtttgtggactgccacaacgacgggtgctcgatccatgtgttctcctcaatcaaaaaagaataaaaaaaacgttaatagaatggaaaaggtgaatgcttgaggaggtttggtgggtcaacagcaacatgagagggaaatgtctttggtttccaggaaggagagagttggtgagagcgccggagtgtaaagtctaaggcactcgcctttgctttatacgaaggttaggaataatagtgccgagagcaatcaggcaacacacaccaaccctgctaaactcccgggcctcccagctcataaatagagtatcgctgcgaggccgagcagtgggcgaccctgtgagcttagctagcaagcaatcaagcactgccacctgcaacctcacggagaaagttaaggcggcgagagacagagagatcc

SEQ ID NO: 2 - DNA, 2303 bp, Setaria italica
  source 1..2303: mol_type = genomic DNA
aattctcagtccaaagcctcaacaaggtcagggtacagagtctccaaaccattagccaaaagctacaggagatcaatgaagaatcttcaatcaaagtaaactactgttccagcacatgcatcatggtcagtaagtttcagaaaaagacatccaccgaagacttaaagttagtgggcatctttgaaagtaatcttgtcaacatcgagcagctggcttgtggggaccagacaaaaaaggaatggtgcagaattgttaggcgcacctaccaaaagcatctttgcctttattgcaaagataaagcagattcctctagtacaagtggggaacaaaataacgtggaaaagagctgtcctgacagcccactcactaatgcgtatgacgaacgcagtgacgaccacaaaagaattagcttgagctcaggatttagcagcattccagattgggttcaatcaacaaggtacgagccatatcactttattcaaattggtatcgccaaaaccaagaaggaactcccatcctcaaaggtttgtaaggaagggatgatggattgcttttgagaatgacttcttaaagcgtcaagcttttctgactgtgtcaggtcagcttcaggttgaaacttatgcttgtgctctcagtagtgtatatacctttggaccaacgttccgggcagagaactcacatacatcaagacatctggcagagttttggatggttgaaccagaaaatgcatttgcaaacttgcaggtgagctgcttcttgatgactaactttattactttgtggttcgccacctatcaaattggatcatggggttttgtgtggacataactaatgttaaacttgtataaattgtgtcacaggatgatatgaactgtgcagaaaaatatgtacaatacctctgccagtggttactcgatcattgtgaagaagacatagatttcattagcaaaaaatacgagagaaacagtagacataatcaaactgcaattgaccgtctgaagcttgtttcctcaacgcattttgaacgtatttcatacacaatggctgtggacattctgaaaaatacagaacaaggttgaatggggaatcgatttagcatctgagcatgaaaggtatgtgcaagttgtcagttgatcttactggtcttcacctgatttaccttctttgattggttaactgtaactacgtattctgtgaaggtatttgactgaggtgatatataagaagccagttattgtttataactatcccaaagaaataaaagcattttatatgaggctcaatgatgatcagaagactgtttctgctatggatgttcttgcgccacaggtatagatcgaattgttgaaatgtctatgatgctgtccattgttcactgaagtgccccacaccattctaccctcaatcagcatggatataagcagccagattcatgtctgctcttagtagaatataactatttctttctgccttttagaatttagatatctctggattcttttttcgccttttcaccaattacaaagaactaaaactgcatataactatattaagataacaatatttacattttctgaaatagctgtatgcttgcaactacatgctggatattttgctttgcctgctttgtatatagtttgaaagtgagctttgtggccgatgatttctacctaaccataaattattttccttggtaggttggtgaattgactggtggaagccagaggagcatctagatgtcctgaaacagaggtaccgacttgctcaatataattttgtttctatcaggatcaatattaggtttcatttgctcgtcggtggaggtagcaagcagttttgtccatcattggttcacgaatatttgctgaacattgtccaatatttgttctacagaattttggatgcgggattgcccatcacccctgatgcgagctagtctgcttcatggcgaggcggtgacctcgacgtgcagggtgccagggtagagtgcccatcacccctgacgcgagctagtctgcttacgcaagcagcgacgtcacaagtgtagtaaaaggcctcgttgacccacgaccaatccaccgcttcctctagcaccttcttccccgagcaccggcaggcagcagcgagatctaggcagcagccatcgctcctcttctcccccctgctcctgtataaatagcagcaggcaggggcaaccaattccatcaactcgtatcatcgttgatatctcttgcagcgttgggtctctgtcacacacacaggaagcacaggaagctaagctagcagtcgcgagagagcgagcg

SEQ ID NO: 3 - DNA, 1050 bp, Setaria italica
  source 1..1050: mol_type = genomic DNA
aattctcagtccaaagcctcaacaaggtcagggtacagagtctccaaaccattagccaaaagctacaggagatcaatgaagaatcttcaatcaaagtaaactactgttccagcacatgcatcatggtcagtaagtttcagaaaaagacatccaccgaagacttaaagttagtgggcatctttgaaagtaatcttgtcaacatcgagcagctggcttgtggggaccagacaaaaaaggaatggtgcagaattgttaggcgcacctaccaaaagcatctttgcctttattgcaaagataaagcagattcctctagtacaagtggggaacaaaataacgtggaaaagagctgtcctgacagcccactcactaatgcgtatgacgaacgcagtgacgaccacaaaagaattagcttgagctcaggatttagcagcattccagattgggttcaatcaacaaggtacgagccatatcactttattcaaattggtatcgccaaaaccaagaaggaactcccatcctcaaaggtttgtaaggaagcaggatttaggtttcatttgctcgtcggtggaggtagcaagcagttttgtccatcattggttcacgaatatttgctgaacattgtccaatatttgttctacagaattttggatgcgggattgcccatcacccctgatgcgagctagtctgcttcatggcgaggcggtgacctcgacgtgcagggtgccagggtagagtgcccatcacccctgacgcgagctagtctgcttacgcaagcagcgacgtcacaagtgtagtaaaaggcctcgttgacccacgaccaatccaccgcttcctctagcaccttcttccccgagcaccggcaggcagcagcgagatctaggcagcagccatcgctcctcttctcccccctgctcctgtataaatagcagcaggcaggggcaaccaattccatcaactcgtatcatcgttgatatctcttgcagcgttgggtctctgtcacacacacaggaagcacaggaagctaagctagcagtcgcgagagagcgagcg

SEQ ID NO: 4 - DNA, 898 bp, Setaria italica
  source 1..898: mol_type = genomic DNA
aattctcagtccaaagcctcaacaaggtcagggtacagagtctccaaaccattagccaaaagctacaggagatcaatgaagaatcttcaatcaaagtaaactactgttccagcacatgcatcatggtcagtaagtttcagaaaaagacatccaccgaagacttaaagttagtgggcatctttgaaagtaatcttgtcaacatcgagcagctggcttgtggggaccagacaaaaaaggaatggtgcagaattgttaggcgcacctaccaaaagcatctttgcctttattgcaaagataaagcagattcctctagtacaagtggggaacaaaataacgtggaaaagagctgtcctgacagcccactcactaatgcgtatgacgaacgcagtgacgaccacaaaagaattagcttgagctcaggatttagcagcattccagattgggttcaatcaacaaggtacgagccatatcactttattcaaattggtatcgccaaaaccaagaaggaactcccatcctcaaaggtttgtaaggaagcctgcctatggcggcttattccccatttgcctaacctgaaaatcgaaagggagtgcatgacagggcaaacactagtgttgcctgcatcaataatcgtccatgattatatagaggtagcatgacttttttaggcgtcgtgtcctaatcaatcagaaaagaaagccaacctaatcgctatgggccgcaaccaccgatgcgactatgcgagtatatggaacccgttgctactcccccactatatatcgtggagtctgatggcaatccaacggcagacgagatttgcagcgcacactgagcgagtacttggcaggccgatcagctcgttgatagcaagctcactcgtcagtaagtagcaatcagg

SEQ ID NO: 5 - DNA, 1971 bp, Setaria italica
  source 1..1971: mol_type = genomic DNA
aattctcagtccaaagcctcaacaaggtcagggtacagagtctccaaaccattagccaaaagctacaggagatcaatgaagaatcttcaatcaaagtaaactactgttccagcacatgcatcatggtcagtaagtttcagaaaaagacatccaccgaagacttaaagttagtgggcatctttgaaagtaatcttgtcaacatcgagcagctggcttgtggggaccagacaaaaaaggaatggtgcagaattgttaggcgcacctaccaaaagcatctttgcctttattgcaaagataaagcagattcctctagtacaagtggggaacaaaataacgtggaaaagagctgtcctgacagcccactcactaatgcgtatgacgaacgcagtgacgaccacaaaagaattagcttgagctcaggatttagcagcattccagattgggttcaatcaacaaggtacgagccatatcactttattcaaattggtatcgccaaaaccaagaaggaactcccatcctcaaaggtttgtaaggaaggcgcagagtcacggcgtactagtcagctgccgagaggatggatgggatcatcgatcatgccaggatcgtcgtcgtttccttgacagtttttgaccttttgcgtcatgccgccccgagtcgtcaccattgcttgtgtctccttacgtggaaaattccatgaaccggccgaatagctttgtcgcaactgagctgaaaaaggagactgaaaatgatacaagtacttgatgtttggtgcgagatagacatcaccttttgaacggatcaattagtagtttgcagcgcaaacagacgattgaaaatgcaagcctgccagctgcactgatgggaaaagggcatcctaattcctgttcaaataaagggcatgattagcgggatactactacccatcatcttgtgcaaatttcttgagatgcttgtactgtttctgactgccgttggcgtctgacagcgagatgctgtgtgctgcagcagcaactctacggtgatattttccgtcgccatgcagtttttttcccgtgtggtaacaaaatacaagatttcctgtcgtcgccatacacttcaaaggtctagaaattaataaagcgaactctattttggaatgtttcgatgggactataacgattttctgaacgtctccagtactgatggttctaactgtcaaaattaaacttgtcgctttatcaatgtcttgactgccggtaactgacagatagtaacctatgcaagctttagtcaagaaacggagataagcacaactcagccacttgcacatcgcaatcactcggatcagttatagacctttctcacaggatttcaaccccagacaaattttgcatggctggcatggttgcattgcaggctaacaaccacgtgttgagtggagaaattgatgagatgccttcaggcttccttattctgaatattacatgtttttgtgctcttgtatctccttacctaatcgaacagaaaaggtgcagcaggagagccaaattctggtttgcgccaacaagaaagagagagagccagaatttgacaggcatgcttgattattctatattaaatcttatctggcatgcttgacaggaccagcaaatgttaaaaagatatgaaccgtacattgaagattgtgatgtctctaaaacatacagtatatgtcctccctagcctgcaagcactcgttcgtttaccattataatttggagactcgaaccatcttcatatgatgcatgacaaactaaccactcattactgatcgccaacaaacatgcatgcagctcacaccgctagcaaacagcaagacatgttaccaacagactgtcacgggcgcaaaaatgatcaaacgtgcaggctactatatatacgcaatatgcaatgcatgatattcaggccatcgatcgcaaacacttgaaaaggattgtagtagtgctactagtc

SEQ ID NO: 6 - DNA, 2167 bp, Setaria italica
  source 1..2167: mol_type = genomic DNA
aattctcagtccaaagcctcaacaaggtcagggtacagagtctccaaaccattagccaaaagctacaggagatcaatgaagaatcttcaatcaaagtaaactactgttccagcacatgcatcatggtcagtaagtttcagaaaaagacatccaccgaagacttaaagttagtgggcatctttgaaagtaatcttgtcaacatcgagcagctggcttgtggggaccagacaaaaaaggaatggtgcagaattgttaggcgcacctaccaaaagcatctttgcctttattgcaaagataaagcagattcctctagtacaagtggggaacaaaataacgtggaaaagagctgtcctgacagcccactcactaatgcgtatgacgaacgcagtgacgaccacaaaagaattagcttgagctcaggatttagcagcattccagattgggttcaatcaacaaggtacgagccatatcactttattcaaattggtatcgccaaaaccaagaaggaactcccatcctcaaaggtttgtaaggaagagacccagcaacctaccgagggggtacccgaggtagtgttttgtggtggggctcgtcgaagatcaggaacttgaaggtgaactcgaacacacgatttagacaagttcgggctgcttatgccgcataataccccatgtcatgtgtgttggttggattgtattgattgatcagatatttggagggggccctgcctcgccttatattgcccattgccggaggcagggctacaggtcggttgttgtacaagagtactagtcggttttgaccagcgagtcctactctaattgctacaagtagtttcctaatccttgactagtccttgtccgccacgtagaccacgacgtcttgcacctagtctctgtgtttgatacatcttggtgtacagtccgatattgtaggactatccaagcttcccagtaggcccatagatgtatggccgacaactggataatgtaactctgggtcagtactatccttatctatatagacacaaacaacgtactatagcagaagtttaagctcgtaacccaccaatatttggtggcatagaccacgtattgctgatatagtgctcgtaacccaccaatatttcgtggcatagagatctcttaggcaataaattagcagtacgaaacaatctatgtccacgtgttgctaatacaatgttctaaaccttacagcctactggacagttctctagccatgatacatgtgcatgtccgaacaaatatttatgggtacccgaaaggttaattttttgtagtatttatgagggggaggggggcgttgacgaaaaaaataacttagctaagcgtaattggcttaaaaacatacaatgttgttccagcatcaagcctacgtgatcatttcacaaaaccaactcaaaagataggtgtcatgttccttttagtgcaaaacttaaggacacctaccttgcaaaacttagctttgttacccagaatgaaccgctaagctcgaggagctctgaacttacatgaccaaatatattaaacacaaaagtcatgcatgattttctttaataagtatcgagcaatatggttcgggtgtctttcgtctcatacctctattgtcctccgtgatcaacaagggtggatccgggtggtgcaagggggctcaagcccccctacctctcccaaaggagaaagaagggagaagaaagtgaaggaagaagaaaccccctatattctaatgctacctccgccactgctgatcaacacaacattcttaaaaccatttccttggcatttgcgcatgttacaaggtacaaaagagccagcccatatgccaagttactaaactaaactatgatccaccatggagcgagaacaaacgtcaacaggcatcaaccaatgcagcaatcttgatcgctagtactgtccggcattatatctgaaacaaatccagatcacccatctcatcacagtcacatgcattcatggtcacgggaaccgttagcaaaccaccaactaatcagcattgcaacactcttcctcctataaatgcagcgagcgggggacaccataaaccatcacaggcacttagcgatcaagttaattttgtttctgctttgtgcgcctgtgttccagtaattactttccgtgtagcaaaa

SEQ ID NO: 7 - DNA, 1519 bp, Setaria italica
  source 1..1519: mol_type = genomic DNA
aattctcagtccaaagcctcaacaaggtcagggtacagagtctccaaaccattagccaaaagctacaggagatcaatgaagaatcttcaatcaaagtaaactactgttccagcacatgcatcatggtcagtaagtttcagaaaaagacatccaccgaagacttaaagttagtgggcatctttgaaagtaatcttgtcaacatcgagcagctggcttgtggggaccagacaaaaaaggaatggtgcagaattgttaggcgcacctaccaaaagcatctttgcctttattgcaaagataaagcagattcctctagtacaagtggggaacaaaataacgtggaaaagagctgtcctgacagcccactcactaatgcgtatgacgaacgcagtgacgaccacaaaagaattagcttgagctcaggatttagcagcattccagattgggttcaatcaacaaggtacgagccatatcactttattcaaattggtatcgccaaaaccaagaaggaactcccatcctcaaaggtttgtaaggaaggtgttgctaatacaatgttctaaaccttacagcctactggacagttctctagccatgatacatgtgcatgtccgaacaaatatttatgggtacccgaaaggttaattttttgtagtatttatgagggggaggggggcgttgacgaaaaaaataacttagctaagcgtaattggcttaaaaacatacaatgttgttccagcatcaagcctacgtgatcatttcacaaaaccaactcaaaagataggtgtcatgttccttttagtgcaaaacttaaggacacctaccttgcaaaacttagctttgttacccagaatgaaccgctaagctcgaggagctctgaacttacatgaccaaatatattaaacacaaaagtcatgcatgattttctttaataagtatcgagcaatatggttcgggtgtctttcgtctcatacctctattgtcctccgtgatcaacaagggtggatccgggtggtgcaagggggctcaagcccccctacctctcccaaaggagaaagaagggagaagaaagtgaaggaagaagaaaccccctatattctaatgctacctccgccactgctgatcaacacaacattcttaaaaccatttccttggcatttgcgcatgttacaaggtacaaaagagccagcccatatgccaagttactaaactaaactatgatccaccatggagcgagaacaaacgtcaacaggcatcaaccaatgcagcaatcttgatcgctagtactgtccggcattatatctgaaacaaatccagatcacccatctcatcacagtcacatgcattcatggtcacgggaaccgttagcaaaccaccaactaatcagcattgcaacactcttcctcctataaatgcagcgagcgggggacaccataaaccatcacaggcacttagcgatcaagttaattttgtttctgctttgtgcgcctgtgttccagtaattactttccgtgtagcaaaa

SEQ ID NO: 8 - DNA, 1518 bp, Setaria italica
  source 1..1518: mol_type = genomic DNA
aattctcagtccaaagcctcaacaaggtcagggtacagagtctccaaaccattagccaaaagctacaggagatcaatgaagaatcttcaatcaaagtaaactactgttccagcacatgcatcatggtcagtaagtttcagaaaaagacatccaccgaagacttaaagttagtgggcatctttgaaagtaatcttgtcaacatcgagcagctggcttgtggggaccagacaaaaaaggaatggtgcagaattgttaggcgcacctaccaaaagcatctttgcctttattgcaaagataaagcagattcctctagtacaagtggggaacaaaataacgtggaaaagagctgtcctgacagcccactcactaatgcgtatgacgaacgcagtgacgaccacaaaagaattagcttgagctcaggatttagcagcattccagattgggttcaatcaacaaggtacgagccatatcactttattcaaattggtatcgccaaaaccaagaaggaactcccatcctcaaaggtttgtaaggaagtgtactgtcatattgtcgtggtttttcaattgctgtacctgatgcaaacgtaatgggtttactaatcttgcacccgccggcttcaaaatgaagagtgctaatttggtccacgtcaccatcaccggttcgaactgtctagaatggcaggcaaagatgattggacaggcatgcagggaaaaagagcaccgttgacgatgtatgcgagttcccaccattgcgagcaatgattatcagccacacgacttactcttcagagctaaccactgccatgcagagaaaaagtgaatcatattgtcatgatctacaacgaagtgaaacaatcaggcatgctaaagtgctgaaactttactgatctctcatgttggacaacaaagaatacgggaatacatcagcaacgcaactcttgagctttgcttgccgaatgaccagctagaatttccaagcatttacagaaacatgactttaagtttcagaaaaacaaatacaaggccactaaataagcgtggggataacatatcctccagatgacaggcaatctgcaacttgcagccattcaaatgtacgattaacaaaatatttaagcgccacatgagataatatatcctccaattagggcctttagtattgtcattagctcataaccatggtgcatcctcacatggacgctgcataagaagttcataatagcaacagacatatgaacaaagcatggtgcgcctgcccggccggactagctagtactaccaatcatggaataagctagtaccctaaatgaaattaaaatggtttttagcgattatccacgccgtccagaatactctaatccacaagttgaggccgcccatgaagccgcgagagggcgacgccatgtgtataaaaggggcctaagctgagtggacttgctgcatcagattagtaagcaatctcaagcgcagagagccaaagctttcggtgtagctcgaagagcaaagcgaaggcaag

SEQ ID NO: 9 - DNA, 1920 bp, Setaria italica
  source 1..1920: mol_type = genomic DNA
tgtgccatacccgagtggccattatataaatgtaaacttgattgacgaaataattcaggcacaagctggaaaaatattatttaaattttttttcgatcaatcagggcatcaggtacaaaagctggacagtgtgatcgaaaaggcaacacctggaatggggtgttcgttcggttgggtgagcgcagcaggcccaaaagccgacccaagcaacatccagcgaagaaccagttggacttggaccgaccgattggcgggcgcgcacgtactgatgctgcggggcccactaggcagatcggacggcgggtgcgtcctccgcgtcgcccatcgtgcggtccaggttgtctcagcatctccagctcattccagcctcaggcggctctttggggggcctctatttattttctctctccttttttcgactcgctctcatttttctccatttctttttctttggtcccggaccacaggtacttccagtggaaggaatataattgtagttttctattgtgtaaatagcattgtctctgatacacaatagacatgaaataccttggtgccagggttctcactcttctggttatgttgtttgattcttgatccaaactcaagatgctgaactgaaatcataaaatttcatcctttacaaattaccctaaaggagttgttttcattttgccttcaattaaagttcttcgccttcaacggtgtggtttgttggaagttagaagcattggcttcgtggcatggacctacttgcaaataatttcctcccaattaaaagtttttttttgcaaataatgcctcttttgatgccatcgccttttctagcccgtgacaaccggagttcaggagatgcataactgtctttgagatccccttttatttatttttatttgattgcaaactaattttagttggcactagccaggatgggctaaataattcttgagatgttggcctaaataattttcagaaatgaagtgtcctccacgtctccatgacaaaaaaaaaatactccatgttggactacagtctaaaaaaagaacagagctgtaacatgatgattaaaaaaaagaagaacatttgagacctctgtttcatgctgaaattataccttgtttttttccattcttgttaccgtggtcaaaaggaaatgttagatactaactgataactgaaaaatagatgcatatccttaaaaaagatctccatttggaaaaaatatgataaacacgaaattcgtagacgccgaacatctgaaatattattcaattttttgggggaaaaaaatacacgcctcgtatttcaaaccgtatctgtgtcacggaccacgcatcaatcgagtccacgtaccacccatcccttcccctccccttcccccccgctcttgtataaactccaccaccccagtcctcggggacgagcgcgccgccatccagatccagccgccggaactccgccccctccgccgtcggccccgtcgctccgaccggtcggcttctcccttgctggtaaggaagccctacctttctatggttgttttttttatttcattctgttctgcggtggatggatctcctgttcgctgcgaatgagcgctccaatccgaatccttgttgttgctggtatgggtgctccgattcgtctatctcgtggcggatttattcgctgcgcggcggagtagtagttggatcagtttgtttcccagtttttttgttaggattatgaagaaaggtttatggggaacggaaggtttacgtgccacaataaactgcagcaagcagcctcactggaagtggtagcttgcctgcagaatttatttgataggattacctttcacgggctaaataagcagattctgattagtaggagtacccttcttatgcttgaatctgttgatgcaacagaacaactgaccag

SEQ ID NO: 10 - DNA, 1403 bp, Setaria italica
  source 1..1403: mol_type = genomic DNA
attgtctctgatacacaatagacatgaaataccttggtgccagggttctcactcttctggttatgttgtttgattcttgatccaaactcaagatgctgaactgaaatcataaaatttcatcctttacaaattaccctaaaggagttgttttcattttgccttcaattaaagttcttcgccttcaacggtgtggtttgttggaagttagaagcattggcttcgtggcatggacctacttgcaaataatttcctcccaattaaaagtttttttttgcaaataatgcctcttttgatgccatcgccttttctagcccgtgacaaccggagttcaggagatgcataactgtctttgagatccccttttatttatttttatttgattgcaaactaattttagttggcactagccaggatgggctaaataattcttgagatgttggcctaaataattttcagaaatgaagtgtcctccacgtctccatgacaaaaaaaaaatactccatgttggactacagtctaaaaaaagaacagagctgtaacatgatgattaaaaaaaagaagaacatttgagacctctgtttcatgctgaaattataccttgtttttttccattcttgttaccgtggtcaaaaggaaatgttagatactaactgataactgaaaaatagatgcatatccttaaaaaagatctccatttggaaaaaatatgataaacacgaaattcgtagacgccgaacatctgaaatattattcaattttttgggggaaaaaaatacacgcctcgtatttcaaaccgtatctgtgtcacggaccacgcatcaatcgagtccacgtaccacccatcccttcccctccccttcccccccgctcttgtataaactccaccaccccagtcctcggggacgagcgcgccgccatccagatccagccgccggaactccgccccctccgccgtcggccccgtcgctccgaccggtcggcttctcccttgctggtaaggaagccctacctttctatggttgttttttttatttcattctgttctgcggtggatggatctcctgttcgctgcgaatgagcgctccaatccgaatccttgttgttgctggtatgggtgctccgattcgtctatctcgtggcggatttattcgctgcgcggcggagtagtagttggatcagtttgtttcccagtttttttgttaggattatgaagaaaggtttatggggaacggaaggtttacgtgccacaataaactgcagcaagcagcctcactggaagtggtagcttgcctgcagaatttatttgataggattacctttcacgggctaaataagcagattctgattagtaggagtacccttcttatgcttgaatctgttgatgcaacagaacaactgaccag

SEQ ID NO: 11 - DNA, 1158 bp, Setaria italica
  source 1..1158: mol_type = genomic DNA
ttgtttggattcatggatttcaaaatctgattccatggttgtttctttgatacatgccttttttgcccggcgtccagcgccacgtccgtcggaggatgccaccaggggaagctcggggctggctgaagaaatcgagctccagattggtcgctgtggtgttaagactcccgacagaattgccgaggtcccctcgcgaatccatcgatggccagcagccgcgcctgctgattccgctggatccggcgtcggcggccaagcctcgctccgattaggcgagcggcgactatgggcgggcctggtacagtgaacaagcggggcctgctactggggacgagatgctaggaggcggcgcaaggagcgtgcgcgcgatggggagggatgggaaggaggcggtggcggcgggattctgcgagcgacgcaggaggggacggagcacgggaaagatcgaggctttctgtgcgggaacgggaagaaaggggaagaccggagaatggtagaatcggggccttaaacagagcaacacgagaccttcaatcgacgggagatgcggcggcgttcgccggcacaaaggcacggcggagcctgcgctgtccgccgtgcacgctgtggccgagagacggcttgctgtttctttctgttgttgcgggtgatcgaacaagccacctatttcctgtccgatccagccgccggaactccgccccctccgccgtcggccccgtcgctccgaccggtcggcttctcccttgctggtaaggaagccctacctttctatggttgttttttttatttcattctgttctgcggtggatggatctcctgttcgctgcgaatgagcgctccaatccgaatccttgttgttgctggtatgggtgctccgattcgtctatctcgtggcggatttattcgctgcgcggcggagtagtagttggatcagtttgtttcccagtttttttgttaggattatgaagaaaggtttatggggaacggaaggtttacgtgccacaataaactgcagcaagcagcctcactggaagtggtagcttgcctgcagaatttatttgataggattacctttcacgggctaaataagcagattctgattagtaggagtacccttcttatgcttgaatctgttgatgcaacagaacaactgaccag

SEQ ID NO: 12 - DNA, 789 bp, Setaria italica
  source 1..789: mol_type = genomic DNA
gggcagcgctaccgctatggagtgcctaggcaccaccgtatcgggggccgctcaagggaggatagagggaggaggatgaagagagagggggaggaagagagggaaggaagacccaccaccacttgttgcctaacatgtggatcaagcgccacatcatgcgaaaccaccctcaaaacagctatgggacaaaaacaaacggtttagaagttgagggatgaccgatatctagttttgcatgtaagggatgaaactcggacaatagcaatagacgtgggaccttgaaaggacttttttccaaaataaaaaagacacaacgcgtaatttgggccaacggtcacaggccgtgggctaacatcctcttcggcctgctgcagcccaccaacatcatataatccgccgcaagcccgcgagctccatcatctacggtctaccgtctacccctgtccggcccacgtatccgcctcttcttcctccaaccgcgacgtccccccgatccaaccctaacccctccgtcctccactcctccgccctccgcatcgccacttcgcacgcaggcgccgaacccccaccgcctccttgccggtgcctcctccccctacctcccctcccggcttgcgactcctcccatcggcggctctccggtgcgtgcccctcatcctcccccttacctgtacacgcctcctcccacttctcgggcgttaatttcaccttccacgctcgctccctctctctctcttcgcttagggcttcgcgttggtcgcgcgggatacgactcctacgtcgcgcgca

SEQ ID NO: 13 - DNA, 1859 bp, Setaria italica
  source 1..1859: mol_type = genomic DNA
ggtgacgagcatggacagtggcatgcagcatgtggatgggaacgccgtaacaagtgtcgattccggaggccacgggggtgtccgggacctccatctcgggactcgattttcgctaggacctcctctggatgtgacttgtctcttctgtgcaccgatgcacgctgctgcggcgtcggcgattgcaagcatctctcgactgcactgacgggcctctccctcgtatgggtagcctagccatcaactttcctgccctgtttccttcccgcacgcaaggctatgcaacaaaacctttgttagctgccaagctgatggcttttgctcgcttggaggcgacaggtgttgatacctcccatgtgatcgttgcaacagagaacctcgtggagttgtgggagtactagcgtccacccatgcgttaggaacgcagtatccaaccattccaacccccttctggccttctcaactatttgtcaaaattgttaagttaactaaacaatacaaccctgcgttctttttggctcatattgttatttgttcgttccgacctatatagattatgttttatatctctacaatttgctcttgttgtataaactacatgttcaactgatccggttagaatgacatgataatgataatgataataataatgatggtggagggtgcatagtacaaactcccattccataagatggtataatttgttctagatatatagactttttgttctatgtaaataaaattttgctcaacttatattcactttaaaaaatggtagttaaaggatggtggagggtgtagcgttttgttatgtcagcttttgtatgattcgctctctgtgtataatatttttttcacttacataaattttgttctagttaagatggcagtgtgaggagagaagggggcagatgacaacacccggtatattctctctcttcttcctcttcttgagagaggagttctctgtctcgaagaaccttttcatattcttcttttccgcaggctccccggctccatgggccgcagcctgtttgtgtgtgaacggaatagcggcccagagaacgcgcgcggtcgacatggtcgcgaatcgcgatttcgctgccttttttcttttcccgtttttataaataaatcagcccgaaaaaaggacgcggtcgtggaccgaacaaacctttccccaaaatttcccctcccctgcaccgaacgaactctcgatccgatcccgatccctgcagggcgccgcctcggctccccgattcggccccggatctgctcgtcgctcggcgggggctctcgattggtaccagctttccctcctctctttggttccgcagggtcccgaggttagggtttgcgagggtaggtttcgggcctcgattcgctcgattgaggccggattttgcacggggacgtcggatccgtgcgtgatctgtaggtttcggttcggattgtcgcgatttcgagagtcaattttgcgtgatttttctggtgggcggatgcggacctagggtttcgttaggtcccgaagtgtttgactcctattcgcgaattcgatagggtttcaggccgcgatattcgagcctgttgcctgatttaatcgttgcatgagcaaaaactttgttatgttgctaactcagtaggaatggcaattcatttgagcccttcatttcggcagttgaacatggccattgcatttggtctgtagttacctccataaggttgttcgtggggcttgtatagcttatatcctttgttgttactcccgaattggtgttttccttttagtcttgtgcagtgactgtttgctactgagtgacataattataattaatttcgttctgtatcctctcagaacaagc

SEQ ID NO: 14 - DNA, 1943 bp, Setaria italica
  source 1..1943: mol_type = genomic DNA
aactgctactagcagcacaagcattctttatttttattaacaataatttctacaacatgtcattacaaatattttattcgcgagatgcgagggcacgccaaggcccggagtctcgaggaggacgacatcgtgagatgaatgcatatgtctccttgtgttgcaaggtcacgaatggaagtatacttgctagggctcatcttgttcttcgacgagtggacgaggactcgaggagtccagctgcggactgcttcggcagacggacaccacgaaggacgtaccctccttccaaccactggtctgttttatccaagatctgagatcaagacgaaacataactatggttgcagcttcaattctttgcaaccgctgagtgcaaaacattttatgctgatgtaataatttctatgagaaacgataattacgatgcttatgtgtgagcttgccatatgtgcaattaatgctttattttttaagaaaataatatcttttctatggcaattttatccccacaatattagcccgtagcaatgcacaggcactatccctgtacgtatataaacgactatagctaattgaaatggcggagtatgccttggacccaccttactgctagttgaatcggcgaaattttccttctctaagcagcacatcttaaaaaaatataggaactgtttggctgcacagcactgcagctacagctgctgctgccagcgttttagcctactgtagcggttgcagcaaggctgcatgctagcagcccgaaagtagcacagctaaacaggcccaaaactttttcatatgaattttagatccgaacattgtgtcgattatttgagtatcaagatggttccaaataaaaaaatatgaactacaaagttgtacaatgtttatataaagtttatatttgtctaagttcatatgaaaaagttatatattttttttaaaaaatgtgctgctcagagaaagagaattccaccgattcaactggcggtaaggtcataaattccgttgtttcggttagatagccaattcaaatgtctatatgagtatagatttgcaaacttttattagaacatatatttttacaaaacattaaaaatactttttacaaaacatatagatttgcaaacttttattagctggctgctgcagctgcagccagccgaaagcagcacagccgaacatgcccataactttttcatatgaatcttaatctgaacattgtgttgattatttgaatactaagatagtttcaaataaaaaagtatgaactaccaagttgtacaatatttatataaagtttatctctttttgtgtttgcattcgtatgaaaaagttatatttttttgaaaaaaatgtgctgctcaaagaactggcggtaaggtcataaattccgctgtttcggttggatagccaattcaaatgtctatatgagtacagatttgcaaatttttattagaacatatatttttgcaagacattaaaaataaaagacatataaaaacaaaacataatcaactttccttgaagccacaccactcgccgcagccgcgctctcaaatttcctggagccagaagcgtcggggtccggagccagacgggcggcagacgcggccgggaaggtggggccccacagggataaggtgcgatgggggcgcgtgtgaaccccgtcgcgccacctgacggtgcgccacaggtacggtactgtatattccaacctgccgttcgtctcccatttcccgcgaactcacttgcctcgcgcgctcccgccgcacacaccagaccctccttcctcatcagaggtaagctcactgcagccagagttcatcaaagtctttccttttccttgtccatgaatcctgaattcctgaccatggagctgagctgatgcctcgacatgaatttgtgagcgaaggcaaacacaagcgcgtgcgaggggaagg

SEQ ID NO: 15 - DNA, 2216 bp, Setaria italica
  source 1..2216: mol_type = genomic DNA
tagcgtagcaggctagcagcctgaactctcgggtgattctgtggcgagttagcttgctcgctgcctgcaatggagtgaatattggcagtacgaagtcacacgggcaggcagagatttggaacatggtggaaacaagaaccatcggcatcgttcttctgatcaatatagtgattactggaagaatcaagaacagaataaaaccaaggcatcctggatctaccatgtcaatctttgctttcatcctcgtcgtttggagcgagcctgttcttgtttgaggcgcgctcgaccgtgccacgaagtaacaggtgcatgaggtctgcagtctgcactagaacttcccagctcccaaattcaacgaaactgaaaaaagtcattggtaacatcaaagtcttgtcttaggatagctgctgttcttgacgctggttagatttgtccaataaattacatgaccagcgcacatgtacttggtattcgacttgatgatttgtatgtactgacggacttgaataaagtagggggaattaggactcagaagtctacgatttttggtccaatatttgattgtgatgttcaaagtcgacgtctctttcgagacgaaattgtgatgcgtagaacaaaaacgacgcaatttcttttcaaaagaaaaagattaggggcagaacaattcaggatctgtttggctggacttataagccggctgaaaagctgaaacggttgatttattgtgagagaaaaacactgtttggtggctgataagctgaaacgaacaggctgtcagtcattaggctgccggctctggaacagtgcgccatcaagagatcacccgaaccatgttgagctcatcaacgtgcgccgctgttgtgctcattggtgtcgcggtcgtggctggcgcgcatctttcgttgcgtcttgtcatggattatccacgacggcagtgtcctgttgtttatgatgacggcacttgattcgccatggatggtgaaaacgaaatcgaagtgcggtcattttttattttaccagatgacgtggttggtgacctgagaggaacagacatgagaagatgagatcagcagctcaattcccacattgacagacgacctttggagcagtacaagagacccaaatgaagaatagtgcaaattacagagtatattagaacacgagaattattaagttttactcgaggtcaatgaaagaatttaggactattcagagcacaggctgtgttcaagtcctgcatgaaccagagaaagttcccaccaaggcctccatcagaggaacgaatttgcctggaactccatcactcaccagtcaccactcaccacttaccagcctaataaagcgtagcagacaatttggagtagacgatcatcatgtgcagtctcataggccctcttctaggaataaccgtatttgatagccaatccacctatgtggtgatttttttttcctttgtccatcggggtcgctttccatccgacgtgtctgcagtgtagcgcaatccatctgtcgctttctgctttctgatgaacgttccggttgacgccgctaagctgccttgtcctccttttctcccgtctgcacagggaggggcacgcccatttcccgtgtgctctggtgcaagccttttcgtttcgcagggcttcttcctcgtgaaagtctctgctcctgcgctcccagggccgcagaactgaagcacggagagagagggcgagcccaggtgaggccccctttctatgccaattctcacacttctgactttttgttcatctcatccttctttgagaattctgtcgaattttggtctatctgtaatgattccagcacacagatagtttatttgagatagcgctgcccttccttctgggtccttgtagtagtagcatcaaaaaaggatattttggagataatcctgaggacgatctttactggatgaaagactgaagcaaaaagctttgagaaactttgttggatgttctgaaaatcttttctttatgagttgatgacacccctgcgttcaaaaccacttgcttaaaaagtggaaaggggcatgatcaaaagatggaaaacaaataccagcatataaaaaagctccagttttgtgaaacaagcatcagggaggataagcatgtgactggccgccgatttacttgcgtagctcacctatttcacagtattcaatttctctgtatttgcccgttgccttgcagtgacac

SEQ ID NO: 16 - DNA, 1479 bp, Setaria italica
  source 1..1479: mol_type = genomic DNA
actgtttggtggctgataagctgaaacgaacaggctgtcagtcattaggctgccggctctggaacagtgcgccatcaagagatcacccgaaccatgttgagctcatcaacgtgcgccgctgttgtgctcattggtgtcgcggtcgtggctggcgcgcatctttcgttgcgtcttgtcatggattatccacgacggcagtgtcctgttgtttatgatgacggcacttgattcgccatggatggtgaaaacgaaatcgaagtgcggtcattttttattttaccagatgacgtggttggtgacctgagaggaacagacatgagaagatgagatcagcagctcaattcccacattgacagacgacctttggagcagtacaagagacccaaatgaagaatagtgcaaattacagagtatattagaacacgagaattattaagttttactcgaggtcaatgaaagaatttaggactattcagagcacaggctgtgttcaagtcctgcatgaaccagagaaagttcccaccaaggcctccatcagaggaacgaatttgcctggaactccatcactcaccagtcaccactcaccacttaccagcctaataaagcgtagcagacaatttggagtagacgatcatcatgtgcagtctcataggccctcttctaggaataaccgtatttgatagccaatccacctatgtggtgatttttttttcctttgtccatcggggtcgctttccatccgacgtgtctgcagtgtagcgcaatccatctgtcgctttctgctttctgatgaacgttccggttgacgccgctaagctgccttgtcctccttttctcccgtctgcacagggaggggcacgcccatttcccgtgtgctctggtgcaagccttttcgtttcgcagggcttcttcctcgtgaaagtctctgctcctgcgctcccagggccgcagaactgaagcacggagagagagggcgagcccaggtgaggccccctttctatgccaattctcacacttctgactttttgttcatctcatccttctttgagaattctgtcgaattttggtctatctgtaatgattccagcacacagatagtttatttgagatagcgctgcccttccttctgggtccttgtagtagtagcatcaaaaaaggatattttggagataatcctgaggacgatctttactggatgaaagactgaagcaaaaagctttgagaaactttgttggatgttctgaaaatcttttctttatgagttgatgacacccctgcgttcaaaaccacttgcttaaaaagtggaaaggggcatgatcaaaagatggaaaacaaataccagcatataaaaaagctccagttttgtgaaacaagcatcagggaggataagcatgtgactggccgccgatttacttgcgtagctcacctatttcacagtattcaatttctctgtatttgcccgttgccttgcagtgacac

SEQ ID NO: 17 - DNA, 1715 bp, Setaria italica
  source 1..1715: mol_type = genomic DNA
tagcgtagcaggctagcagcctgaactctcgggtgattctgtggcgagttagcttgctcgctgcctgcaatggagtgaatattggcagtacgaagtcacacgggcaggcagagatttggaacatggtggaaacaagaaccatcggcatcgttcttctgatcaatatagtgattactggaagaatcaagaacagaataaaaccaaggcatcctggatctaccatgtcaatctttgctttcatcctcgtcgtttggagcgagcctgttcttgtttgaggcgcgctcgaccgtgccacgaagtaacaggtgcatgaggtctgcagtctgcactagaacttcccagctcccaaattcaacgaaactgaaaaaagtcattggtaacatcaaagtcttgtcttaggatagctgctgttcttgacgctggttagatttgtccaataaattacatgaccagcgcacatgtacttggtattcgacttgatgatttgtatgtactgacggacttgaataaagtagggggaattaggactcagaagtctacgatttttggtccaatatttgattgtgatgttcaaagtcgacgtctctttcgagacgaaattgtgatgcgtagaacaaaaacgacgcaatttcttttcaaaagaaaaagattaggggcagaacaattcaggatctgtttggctggacttataagccggctgaaaagctgaaacggttgatttattgtgagagaaaaacactgtttggtggctgataagctgaaacgaacaggctgtcagtcattaggctgccggctctggaacagtgcgccatcaagagatcacccgaaccatgttgagctcatcaacgtgcgccgctgttgtgctcattggtgtcgcggtcgtggctggcgcgcatctttcgttgcgtcttgtcatggattatccacgacggcagtgtcctgttgtttatgatgacggcacttgattcgccatggatggtgaaaacgaaatcgaagtgcggtcattttttattttaccagatgacgtggttggtgacctgagaggaacagacatgagaagatgagatcagcagctcaattcccacattgacagacgacctttggagcagtacaagagacccaaatgaagaatagtgcaaattacagagtatattagaacacgagaattattaagttttactcgaggtcaatgaaagaatttaggactattcagagcacaggctgtgttcaagtcctgcatgaaccagagaaagttcccaccaaggcctccatcagaggaacgaatttgcctggaactccatcactcaccagtcaccactcaccacttaccagcctaataaagcgtagcagacaatttggagtagacgatcatcatgtgcagtctcataggccctcttctaggaataaccgtatttgatagccaatccacctatgtggtgatttttttttcctttgtccatcggggtcgctttccatccgacgtgtctgcagtgtagcgcaatccatctgtcgctttctgctttctgatgaacgttccggttgacgccgctaagctgccttgtcctccttttctcccgtctgcacagggaggggcacgcccatttcccgtgtgctctggtgcaagccttttcgtttcgcagggcttcttcctcgtgaaagtctctgctcctgcgctcccagggccgcagaactgaagcacggagagagagggcgag

SEQ ID NO: 18 - DNA, 1085 bp, Setaria italica
  source 1..1085: mol_type = genomic DNA
agtaacaaatcatacagtatttgccttctataaaggcagctggagactgttctccgaaataaatcatagcaacttaggagtgtttgatacgaggcgctaaacttcagcaggtcatatcggatgttcggatactaattataaaagtcaacacgagctaattacaaaactaattgcacagatggagtctaattcgcaagacgaatctattaaggggctgtttggatacgaggtgctaaactttaacagtgtcacgtcggatgttcggatgctaattaggaggactaaacatgagctaattgtaaaactaattgcagaaccctgtgctaattcgctagacgaatctattaagcctaattaatccatcattagcaaatggttactgtagcaccatattgtcaaatcagggactaattaggtttagtagattcgtctcgcgaattatactccatctgtgcaattacttttttaattagtctatgtttaatactcctaattagtatccaaacatccgatgtgacaggtgttaaactttaacagggcgttcccaaacacccccctaaagctaattaatccatcgttaacaaatagttattgtagcacaacattgtcaaatcatggactaattaggcttaatagattcatctcgcgaattagactccatctgtacaattaattttataattagactatatttaatacctccaattagtatcaaatattcgatgtgacatgtgctaaagtttagtagggtatccaaacaccccttctctcctttcctcttggtatgtttagcagttacccctggctcttggcatccgtttcgtcgacgtgccatggtttaacggacgggacggggacggccggctcacgtgaacaacgcccacgaggccgcgctggctcttgtaaaagcaaccgctccctccctagacgctagtgcctctttcctctctcctccgcccctttttatcgcccgatctcacacattttggaaagaggagagagagaacgcccagccaaacagccaaggaaacaaaccgcggcgagaggcggaggagagggaggaaggagggcagaggacgagcaag

SEQ ID NO: 19 - DNA, 1573 bp, Setaria italica
  source 1..1573: mol_type = genomic DNA
ttcaatttcactggagatcgttccaccagagaaatcaccgtcggagtaattttaggatgaaaggcccaaaagcctaaatggcaggcctaccccagaggcccaagcgatcaagggtagctccgtactttcccgcgacggtgcgatacacggttcgaaatttcaaaattcgaacgggcggccaaacagccgttccttccatttccctgccgtcctcacaaaggctccccttccatccaccgaagtgaaaactaccccgactcaatgactcatgggctgggcagttcactttcatattccagtcccacatgtcagtgtcacgtcttcacgggcgcatgtgaagatcgccgagaacgagaggcgccggctccgcgggacccgccgccagctcaaacccaccgttgccggccgctgatcacgcaagcctcgccccgacgttcgaaaccaaacggccgttaacctccgctgcccccgcgcggcttcggccccgttcaccaacgaggcgggccaccaccacgccgtctaacgcgagccaaacggcggttaggtcacggcctcaccctcacgggccggccgcggccgcctcccctctcctctcgcgctgcctataaaagccgccgcggccgcctcccctctcctcacctcggcgtcttcacaaacgccagcgctccccttccactcccgatcgatcgccgctccgctccctcttccctcgcctccgcctccgatcgcttcgagaggttcgtcgcttgacccgaagggttcgcccccggttgcttgaggcgagtcggggaggaagttccaggtccagtcgccgcccccctctcctcccgtccatcatctcgtcgtcctcgtcgtttaatttccgatttgattcagaggagtcctgcgatttgcagttgcagggcgttagaattctgatttggggtgaactgttttgggggaatttagtcagatctgttggtgctagtaattttagggttcgaaatttgctgcgcgattcaaactgtgattgaggctggaagtaagtagttgctgtcggttttgttgtgcggtacctttgcagcggaagtaagtagttgctcccatcgaatcgaatttttataatttgcagttgtgggtcacgcgttacgcctgctctcgtcaaattgtgcagtgttatttaaatgcttctgtgctctattcgtagtcatcagttttgatcggtttgtgtgtaattgtggatgaattgcgctatttctaaagtttcagttatagtgtactagaagttgattagattagaaaaacgaatatgccttctatcaattcggtggatcccgttcagattctttaaattaagtcatgttcgtaccatttcttagatctgaatgcaaattggactagaggttgtgttcggtgcatgtatctctgagcaactgatatatcgcttattgatgcactgcataatggctaattaaattgatgcatatcataagttgctccacttattgataacatgttgaacccgtgcaattgctcctttgaaccctttataatttgcatcccattaaactgcttttttcccttgcagcctgat

SEQ ID NO: 20 - DNA, 2622 bp, Setaria italica
  source 1..2622: mol_type = genomic DNA
actgccgcgacacgcctcactggcgggagggctccgagcgctctctccccggcggccggcggagcagcgatctggattggagagaatagaggaaagagagggaaaaggagagagatagcgcaaagagctgaaaagataaggttgtgcgggctgtggtgattagaggaccactaatccctccatctcctaatgacgcggtgcccaagaccagtgccgcggcacaccagcgtctaagtgaacttccgctaaccttccggtcattgcgcctgaaagatgtcatgtggcgaggcccccctctcagtagattgccaactgcctaccgtgccactcttccatgcatgattgctcccgtctatcccgtttctcacaacagatagacaacagtaagcatcactaaagcaagcatgtgtagaaccttaaaaaaaggcttatactaccagtatactatcaaccagcatgccgtttttgaagtatccaggattagaagcttctactgcgcttttatattatagctgtggacctgtggtaacctttctcttttggcgcttgcttaatctcggccgtgctggtccatgcttaggcactaggcagagatagagccgggggtgaatggggctaaagctcagctgctcgaggggccgtgggctggtttccactagcctacagctgtgccacgtgcggccgcgcaagccgaagcaagcacgctgagccgttggacagcttgtcataatgccattacgtggattacacgtaactggccctgtaactactcgttcggccatcatcaaacgacgacgtccgctaggcgacgacacgggtaatgcacgcagccacccaggcgcgcgcgctagcggagcacggtcaggtgacacgggcgtcgtgacgcttccgagttgaaggggttaacgccagaaacagtgtttggccagggtatgaacataacaaaaaatattcacacgaaagaatggaagtatggagctgctactgtgtaaatgccaagcaggaaactcacgcccgctaacatccaacggccaacagctcgacgtgccggtcagcagagcatcggaacactggtgattggtggagccggcagtatgcgccccagcacggccgaggtggtggtggcccgtggccctgctgtctgcgcggctcgggacaacttgaaactgggccaccgcctcgtcgcaactcgcaacccgttggcggaagaaaggaatggctcgtaggggcccgggtagaatcgaagaatgttgcgctgggcttcgattcacataacatgggcctgaagctctaaaacgacggcccggtcgccgcgcgatggaaagagaccggatcctcctcgtgaattctggaaggccacacgagagcgacccaccaccgacgcggaggagtcgtgcgtggtccaacacggccggcgggctgggctgcgaccttaaccagcaaggcacgccacgacccgccccgccctcgaggcataaataccctcccatcccgttgccgcaagactcagatcagattccgatccccagttcttccccaatcaccttgtggtctctcgtgtcgcggttcccagggacgcctccggctcgtcgctcgacagcgatctccgccccagcaaggtatagattcagttccttgctccgatcccaatctggttgagatgttgctccgatgcgacttgattatgtcatatatctgcggtttgcaccgatctgaagcctagggtttctcgagcgacccagttatttgcaatttgcgatttgctcgtttgttgcgcagcgtagtttatgtttggagtaatcgaggatttgtatgcggcgtcggcgctacctgcttaatcacgccatgtgacgcggttacttgcagaggctgggttctgttatgtcgtgatctaagaatctagattaggctcagtcgttcttgctgtcgactagtttgttttgatatccatgtagtacaagttacttaaaatttaggtccaatatattttgcatgcttttggcctgttattcttgccaacaagttgtcctggtaaaaagtagatgtgaaagtcacgtattgggacaaattgatggtttagtgctatagttctatagttctgtgatacatctatctgattttttttggtctattggtgcctaacttatctgaaaatcatggaacatgaggctagtttgatcatggtttagttcattgtgattaataatgtatgatttagtagctattttggtgatcgtgtcattttatttgtgaatggaatcattgtatgtaaatgaagctagttcaggggttacgatgtagctggctttgtattctaaaggctgctattattcatccatcgatttcacctatatgtaatccagagcttttgatgtgaaatttgtctgatccttcactaggaaggacagaacattgttaatattttggcacatctgtcttattctcatcctttgtttgaacatgttagcctgttcaaacagatactgttgtaatgtcctagttatataggtacatatgtgttctctattgagtttatggacttttgtgtgtgaagttatatttcattttgctcaaaactcatgtttgcaagctttctgacattattctattgttctgaaacag

SEQ ID NO: 21 - DNA, 1810 bp, Setaria italica
  source 1..1810: mol_type = genomic DNA
cacgggtaatgcacgcagccacccaggcgcgcgcgctagcggagcacggtcaggtgacacgggcgtcgtgacgcttccgagttgaaggggttaacgccagaaacagtgtttggccagggtatgaacataacaaaaaatattcacacgaaagaatggaagtatggagctgctactgtgtaaatgccaagcaggaaactcacgcccgctaacatccaacggccaacagctcgacgtgccggtcagcagagcatcggaacactggtgattggtggagccggcagtatgcgccccagcacggccgaggtggtggtggcccgtggccctgctgtctgcgcggctcgggacaacttgaaactgggccaccgcctcgtcgcaactcgcaacccgttggcggaagaaaggaatggctcgtaggggcccgggtagaatcgaagaatgttgcgctgggcttcgattcacataacatgggcctgaagctctaaaacgacggcccggtcgccgcgcgatggaaagagaccggatcctcctcgtgaattctggaaggccacacgagagcgacccaccaccgacgcggaggagtcgtgcgtggtccaacacggccggcgggctgggctgcgaccttaaccagcaaggcacgccacgacccgccccgccctcgaggcataaataccctcccatcccgttgccgcaagactcagatcagattccgatccccagttcttccccaatcaccttgtggtctctcgtgtcgcggttcccagggacgcctccggctcgtcgctcgacagcgatctccgccccagcaaggtatagattcagttccttgctccgatcccaatctggttgagatgttgctccgatgcgacttgattatgtcatatatctgcggtttgcaccgatctgaagcctagggtttctcgagcgacccagttatttgcaatttgcgatttgctcgtttgttgcgcagcgtagtttatgtttggagtaatcgaggatttgtatgcggcgtcggcgctacctgcttaatcacgccatgtgacgcggttacttgcagaggctgggttctgttatgtcgtgatctaagaatctagattaggctcagtcgttcttgctgtcgactagtttgttttgatatccatgtagtacaagttacttaaaatttaggtccaatatattttgcatgcttttggcctgttattcttgccaacaagttgtcctggtaaaaagtagatgtgaaagtcacgtattgggacaaattgatggtttagtgctatagttctatagttctgtgatacatctatctgattttttttggtctattggtgcctaacttatctgaaaatcatggaacatgaggctagtttgatcatggtttagttcattgtgattaataatgtatgatttagtagctattttggtgatcgtgtcattttatttgtgaatggaatcattgtatgtaaatgaagctagttcaggggttacgatgtagctggctttgtattctaaaggctgctattattcatccatcgatttcacctatatgtaatccagagcttttgatgtgaaatttgtctgatccttcactaggaaggacagaacattgttaatattttggcacatctgtcttattctcatcctttgtttgaacatgttagcctgttcaaacagatactgttgtaatgtcctagttatataggtacatatgtgttctctattgagtttatggacttttgtgtgtgaagttatatttcattttgctcaaaactcatgtttgcaagctttctgacattattctattgttctgaaacag

SEQ ID NO: 22 - DNA, 1964 bp, Setaria italica
  source 1..1964: mol_type = genomic DNA
cgggcgggtctgtgccacgtgcggccgcgcaagccgaagcaagcacgctgagccgttggacagcttgtcataatgccattacgtggattacacgtaactggccctgtaactactcgttcggccatcatcaaacgacgacgtccgctaggcgacgacacgggtaatgcacgcagccacccaggcgcgcgcgctagcggagcacggtcaggtgacacgggcgtcgtgacgcttccgagttgaaggggttaacgccagaaacagtgtttggccagggtatgaacataacaaaaaatattcacacgaaagaatggaagtatggagctgctactgtgtaaatgccaagcaggaaactcacgcccgctaacatccaacggccaacagctcgacgtgccggtcagcagagcatcggaacactggtgattggtggagccggcagtatgcgccccagcacggccgaggtggtggtggcccgtggccctgctgtctgcgcggctcgggacaacttgaaactgggccaccgcctcgtcgcaactcgcaacccgttggcggaagaaaggamtggctcgtaggggcccgggtagaatcgaagaatgttgcgctgggcttcgattcacataacatgggcctgaagctctaaaacgacggcccggtcgccgcgcgatggaaagagaccggatcctcctcgtgaattctggaaggccacacgagagcgacccaccaccgacgcggaggagtcgtgcgtggtccaacacggccggcgggctgggctgcgaccttaaccagcaaggcacgccacgacccgccccgccctcgaggcataaataccctcccatcccgatgccgcaagactcagatcagattccgatccccagttcttccccaatcaccttgtggtctctcgtgtcgcggttcccagggacgcctccggctcgtcgctcgacagcgatctccgccccagcaaggtatagattcagttccttgctccgatcccaatctggttgagatgttgctccgatgcgacttgattatgtcatatatctgcggtttgcaccgatytgaagcctagggtttctcgagcgacccagttatttgcaatttgcgatttgctcgtttgttgcgcagcgtagtttatgtttggagtaatcgaggatttgtatgcggcgtcggcgctacctgcttaatcacgccatgtgacgcggttacttgcagaggctgggttctgttatgtcgtgatctaagaatctagattaggctcagtcgttcttgctgtcgactagtttgttttgatatccatgtagtacaagttacttaaaatttaggtccaatatattttgcatgcttttggcctgttattcttgccaacaagttgtcctggtaaaaagtagatgtgaaagtcacgtattgggacaaattgatggtttagtgctatagttctatagttctgtgatacatctatctgattttttttggtctattggtgcctaacttatctgaaaatcatggaacatgaggctagtttgatcatggtttagttcattgtgattaataatgtatgatttagtagctattttggtgatcgtgtcattttatttgtgaatggaatcattgtatgtaaatgaagctagttcaggggttacgatgtagctggctttgtattctaaaggctgctattattcatccatcgatttcacctatatgtaatccagagcttttgatgtgaaatttgtctgatccttcactaggaaggacagaacattgttaatattttggcacatctgtcttattctcatcctttgtttgaacatgttagcctgttcaaacagatactgttgtaatgtcctagttatataggtacatatgtgttctctattgagtttatggacttttgtgtgtgaagttatatttcattttgctcaaaactcatgtttgcaagctttctgacattattctattgttctgaaaag

SEQ ID NO: 23 - DNA, 369 bp, Setaria italica
  source 1..369: mol_type = genomic DNA
caattcactctgaaaccaatttccaggcatgggcctcatctattgctagctccaccgactgctaaagtggactagcttccaaactactccatctttcttctgcaaaagtatgtcaaacagcgtatacatcatggaacatattggtaaattaaacttcaccagttccgatcatgcatgcagctgcaggttcccagcctgttgcctgttggcaccttttctgctctaataattttggaatggaaccaacccctatgatatttcttctccatctatatatttcggggttagcttgcatgctatccgacagagactaagttgagtgtatttccttgaccgttcagattgggagtggtcgtttccacgatagat

SEQ ID NO: 24 - DNA, 1419 bp, Setaria italica
  source 1..1419: mol_type = genomic DNA
tgtgccatacccgagtggccattatataaatgtaaacttgattgacgaaataattcaggcacaagctggaaaaatattatttaaattttttttcgatcaatcagggcatcaggtacaaaagctggacagtgtgatcgaaaaggcaacacctggaatggggtgttcgttcggttgggtgagcgcagcaggcccaaaagccgacccaagcaacatccagcgaagaaccagttggacttggaccgaccgattggcgggcgcgcacgtactgatgctgcggggcccactaggcagatcggacggcgggtgcgtcctccgcgtcgcccatcgtgcggtccaggttgtctcagcatctccagctcattccagcctcaggcggctctttggggggcctctatttattttctctctccttttttcgactcgctctcatttttctccatttctttttctttggtcccggaccacaggtacttccagtggaaggaatataattgtagttttctattgtgtaaatagcattgtctctgatacacaatagacatgaaataccttggtgccagggttctcactcttctggttatgttgtttgattcttgatccaaactcaagatgctgaactgaaatcataaaatttcatcctttacaaattaccctaaaggagttgttttcattttgccttcaattaaagttcttcgccttcaacggtgtggtttgttggaagttagaagcattggcttcgtggcatggacctacttgcaaataatttcctcccaattaaaagtttttttttgcaaataatgcctcttttgatgccatcgccttttctagcccgtgacaaccggagttcaggagatgcataactgtctttgagatccccttttatttatttttatttgattgcaaactaattttagttggcactagccaggatgggctaaataattcttgagatgttggcctaaataattttcagaaatgaagtgtcctccacgtctccatgacaaaaaaaaaatactccatgttggactacagtctaaaaaaagaacagagctgtaacatgatgattaaaaaaaagaagaacatttgagacctctgtttcatgctgaaattataccttgtttttttccattcttgttaccgtggtcaaaaggaaatgttagatactaactgataactgaaaaatagatgcatatccttaaaaaagatctccatttggaaaaaatatgataaacacgaaattcgtagacgccgaacatctgaaatattattcaattttttgggggaaaaaaatacacgcctcgtatttcaaaccgtatctgtgtcacggaccacgcatcaatcgagtccacgtaccacccatcccttcccctccccttcccccccgctcttgtataaactccaccaccccagtcctcgggg

SEQ ID NO: 25 - DNA, 902 bp, Setaria italica
  source 1..902: mol_type = genomic DNA
attgtctctgatacacaatagacatgaaataccttggtgccagggttctcactcttctggttatgttgtttgattcttgatccaaactcaagatgctgaactgaaatcataaaatttcatcctttacaaattaccctaaaggagttgttttcattttgccttcaattaaagttcttcgccttcaacggtgtggtttgttggaagttagaagcattggcttcgtggcatggacctacttgcaaataatttcctcccaattaaaagtttttttttgcaaataatgcctcttttgatgccatcgccttttctagcccgtgacaaccggagttcaggagatgcataactgtctttgagatccccttttatttatttttatttgattgcaaactaattttagttggcactagccaggatgggctaaataattcttgagatgttggcctaaataattttcagaaatgaagtgtcctccacgtctccatgacaaaaaaaaaatactccatgttggactacagtctaaaaaaagaacagagctgtaacatgatgattaaaaaaaagaagaacatttgagacctctgtttcatgctgaaattataccttgtttttttccattcttgttaccgtggtcaaaaggaaatgttagatactaactgataactgaaaaatagatgcatatccttaaaaaagatctccatttggaaaaaatatgataaacacgaaattcgtagacgccgaacatctgaaatattattcaattttttgggggaaaaaaatacacgcctcgtatttcaaaccgtatctgtgtcacggaccacgcatcaatcgagtccacgtaccacccatcccttcccctccccttcccccccgctcttgtataaactccaccaccccagtcctcgggg

SEQ ID NO: 26 - DNA, 676 bp, Setaria italica
  source 1..676: mol_type = genomic DNA
ttgtttggattcatggatttcaaaatctgattccatggttgtttctttgatacatgccttttttgcccggcgtccagcgccacgtccgtcggaggatgccaccaggggaagctcggggctggctgaagaaatcgagctccagattggtcgctgtggtgttaagactcccgacagaattgccgaggtcccctcgcgaatccatcgatggccagcagccgcgcctgctgattccgctggatccggcgtcggcggccaagcctcgctccgattaggcgagcggcgactatgggcgggcctggtacagtgaacaagcggggcctgctactggggacgagatgctaggaggcggcgcaaggagcgtgcgcgcgatggggagggatgggaaggaggcggtggcggcgggattctgcgagcgacgcaggaggggacggagcacgggaaagatcgaggctttctgtgcgggaacgggaagaaaggggaagaccggagaatggtagaatcggggccttaaacagagcaacacgagaccttcaatcgacgggagatgcggcggcgttcgccggcacaaaggcacggcggagcctgcgctgtccgccgtgcacgctgtggccgagagacggcttgctgtttctttctgttgttgcgggtgatcgaacaagccacctatttcctgtcc

SEQ ID NO: 27 - DNA, 2348 bp, Setaria italica
  source 1..2348: mol_type = genomic DNA
gctgacactaactttatcgcttggaagacaagcctcagagcataacccttaatttcagtatccagtggttatttatccgtattgtgcattaagtttctaggtgttgattcaaaccttagatgcatgatccctaggtttccttgttgatctactagtatgtgtaggtcattagtactaccatgcttaattaggttttggtagaagtctagtgattttctatcactcgcgagatacaagatcttttgatacttttaacaaaggttacttgagaatgaatcactgaggaaagaaaattagagaccgggcggagatgagtttggttaaggatatgaagtggattgaaagtaaacctctgcctatgttcattaaggcccgaaccgttgttggctgtgctgatcggggattgaacagtactaacgacatgccgggagtaggaggtagtcgaaaccagcaaaccttcgtaccttggtgcgcgctaacaacttgagcttgatcctgacttcagcatcgggtactattctataactcatggctgaccctacggggtatcgacggggactagtgcttgagggtcatggggcaattcaaatgttagcgttcgccaagagaatggttgccatgcgcagctcgacggggcattgcgtgtgttgtgtgattagatttaccttgcaagggataaaatcggatcaattcaccatatctctcggataagagaactttgatcacttggtcacgtgtagtaatggaaatggaatggtgatgacatgagatatgtttatgatattctttgatgattagtgttgtataacatgctagctctggttagttatgcaaacctagttggtacttgctacatattaaacccaagctaaaatattgaaagtaaggatctagtaagcttctttttgcaaaagaaacccaaaaaactagaactgagtcatctaagtatttaccacagtcgagtaaaacttgttgagtattagtatactcagagttgttgttgtgatcctgtttcatgtggtattacattcatgtcatgacacatcggtaggctcattgtgttgtcctctgctcgttgtcgttgatagtttatcttctagcttagctttggcaatggttttcaagtttctttccgctgtgcattttaaagctctgtattatttttatatttgaactctatttgtaaagctaattgttataccttaatttgtatagtgtttgtattatctctgctcaccttcgtgtgtgacttgtggtgtattgtttcgatcgagatatcagtggttgaatcaggcttgaccagacagactgttagattacactgttttaagtgtgtactgaccgaatcaaccattaagaggatggttagcgcactggtttaatctgggctattctaccacagtatgaaactggttaatgattttgtctacgtagattcatccccgtctatctatttgggttataccatcgacatacatgcgcgtgcttgttcaaccccaatagcacaatcaatctatatatgctgaagaaaaggagttcatgggcttgtcggctttcgcttcttaatacatggcacaaatgtcgtaaaaggcccttagctcagagaagggtagtgtattggcccacattatgttcatcattgggccatgaatcgtacgattcacttggctcccccgctccttattcgaaaaagaattgattttgatgcactagtaaggtgattatcattttgatgaaatgattccattgggactccaactaatgcgtactgaccgcagctaatactttgtatgccaatgacatgcaacatgtaacaagtacgttgcttaatttgttattggactccaactaatgcgtactgaccgcagctacatgttggatcaggccatcatctccaatgccaacgcggactccttgaagttaaaaggctatatcgttggattcttcagaaactactcaaggaatgggattgatgtcgaaagattttatagtatataagaattactagtcataggtctaaaaaaattctttttattgtccatctaagcccacttaaaattgtttttgtaaaagtatatgaaagatgcatattcccgggagaatcatcaaagaatagtggcttcatcctctgggttttcttttgttcatccatgattcatagattatttttattgtcctatgaacttgtataccaactacttcgacctcaaccagcaggtcctgtactcattagtcatcgccactgacctctagccgccggatgacctataccctgacgcatcattggcctatcaactgcaatataaattgaggcaccaataagcccacttcactcaacactcaaacta

SEQ ID NO: 28 - DNA, 1577 bp, Setaria italica
  source 1..1577: mol_type = genomic DNA
caatcattgccactgaaatccctgagtataacatagttctcacgaagaaggccaaagttgagcccaaaatttttcgataaagtcgttacatcttatttcgtacttatatcatctttacacacatgatcaatatttttttctagcaaaaagtcatgcatgcttccatatacagtgaagatatgggcatggataaatcctaggaacgcaaaaaaaaaattgaccttgctatggcccacgacttcttgattctaccaatttgacgcatgaaacctctctcaagaatggacataaatttttggcaaaaaaggttcaacccaagtatataacataacacacgtatcacaatagtctacgttgctagcatgatggggaacaatacatgctcataaaccaaacatcattgtttaaaattttttggttacatgtttgattcacatgttgccgtaaaatggtgctgatgagcttagacgaaggactcattgcgcttcctgttatcttgtgcaaacatctcaaaagtcattattcaaattcataaagtgaacgatacaacacttttaaccggcgtaatagtttaatagaggtagcgtatagggtcggaatatcatcttctttgtagccataggcatgtcgcacccaagaattgaatggaaatatgataccgttaagttgagcgccagtgtctcatgttgttgtgcaccgatgaaattggttcctgagtatatatggaaaacaaaagagtctaggttttaatccgatccattgttaccacacatccagaaacactatcttcaacttttcatagaaatattatgcaaaagcaggaagaaaaacttcctatggatcgatatagatggccctacaatatgtatctgtagacaaggtagaatacattcaaatatgtcaaaagtagaatcttgggaaactacaatgtgcacaagcagcggtcctcccactttgagcgactttcacctttagagagatagctctaacatatgcatgcgtagatctggtgcaatatatccacaccgattgcaaacggattccacgcaaccacaacgcaaacaccttgtttgcgtgacttacaatactgacttaatctaggttcttgtgtattggctcattacttacttgataacttcttctagaactagtgcgttacctctatcatccatgaggattggctcatggaacaaatcctatccgagtcagatgaacaatgaagctcaaaatgatttggatccacatcagcaaatcacagctttacaaaccaactttaacaaagtggaacacatatttttgtggctaagactttcacgtgtttaaaggtgaaccgaccatgatgttgtcacaaagacaataccaacagaagaagacacttttttgcttgtacaacggcaagttgtcttgccaacacatacattacaacacaagggtatttatcactaaatgccaaaattgactagataccatgtcatctccagtttatcaagctagcgatttgcaaggcacaagcaaaaatcttgctaaagctacatgagctctcatgcctataaatacgccccaaatgttgtgtaggt

SEQ ID NO: 29 - DNA, 412 bp, Setaria italica
  source 1..412: mol_type = genomic DNA
catccatgaggattggctcatggaacaaatcctatccgagtcagatgaacaatgaagctcaaaatgatttggatccacatcagcaaatcacagctttacaaaccaactttaacaaagtggaacacatatttttgtggctaagactttcacgtgtttaaaggtgaaccgaccatgatgttgtcacaaagacaataccaacagaagaagacacttttttgcttgtacaacggcaagttgtcttgccaacacatacattacaacacaagggtatttatcactaaatgccaaaattgactagataccatgtcatctccagtttatcaagctagcgatttgcaaggcacaagcaaaaatcttgctaaagctacatgagctctcatgcctataaatacgccccaaatgttgtgtaggt

SEQ ID NO: 30 - DNA, 1631 bp, Setaria italica
  source 1..1631: mol_type = genomic DNA
actgcgcgtggcacgaaggttatcaaattaaagcctagcattgcacaatcgccaaggatcgcaaaacaatcctcctcctcatctgaggagctgtagctgtcctcatcgtcgtcctcctcatccgatgagtagtcactgtcgtggtcatcttcctcctcatctgacgagcagtcgctgccatcatcgttgtcatcttcctcttcgtctgatgatgagtagtcactgtcgtcaccatcatcttcctcatccgaagagcagtcgctgatgtcgttgtcgtcataatcttcctcctcatccgacgtgtagtcgtcgctgccatcgtcatcggacgaagacgaagactcagtctccggctcgagtatcccttcgagtttcttcagtacccgttcaatggctgcctgtaagcctgccttctgcctgacccaatcgtcgtctacctcgacatagccctccttggcctccatctctttgcgcacgcacttctgcaacttctgatagccctcctccgtctgacagaacgcgttggccctgaattagaagaggtcaggtagccgtcggcgtcaggccggggttgctcgtctctgctaatattgcagtgcatctaggcaggagtccgaattgaactcagagtcctcgatcgatccggattggcgttaaagcacggattagggtaggtttgcaggttatgtggtctgcagatttcttcctttcagagtttgttacggacttctgagtgcaatatatggccgtgctggggtacggtgttgggtcggatcggactgtgggctgaaattgggagcaggtcgaaccgaaaaaaaatagagaagaaaaggattttgtgggctatagatggctagtgagtagtgactgattcttatgtccttcgaaacttggaggggctcatatacatgttgtggtaaaactagcaaaaaacaaaatggagagagagcgagcgagcgagatgacacaaattgaacaatgcagagtctactcaatgttcttcctcctttgggtcggatttctatgaagcaatgttcatgttttttcacgcgacccggatcctatatttcctttttctcttttttcctaggaattggtgggatttgcccaacttgatcatctcacaatattgacctagaatgtctcttgcagtgtaatgctcatcattggtgcaaagcattctagcaggtgagaaaacatgaacgactcaatgacatccatgaggattggctcatggaacaaatcctatccgagtcagatgaacaatgaagctcaaaatgatttggatccacatcagcaaatcacagctttacaaaccaactttaacaaagtggaacacatatttttgtggctaagactttcacgtgtttaaaggtgaaccgaccatgatgttgtcacaaagacaataccaacagaagaagacacttttttgcttgtacaacggcaagttgtcttgccaacacatacattacaacacaagggtatttatcactaaatgccaaaattgactagataccatgtcatctccagtttatcaagctagcgatttgcaaggcacaagcaaaaatcttgctaaagctacatgagctctcatgcctataaatacgccccaaatgttgtgtaggtattcc

SEQ ID NO: 31 - DNA, 1719 bp, Setaria italica
  source 1..1719: mol_type = genomic DNA
ggaacaagggagataacttcaaacatgtcatcttttccttctttttttagcaagaacagtaggggaaaccctactgcggtaaagaaagttgtccaaaagggagaggaaaaaattaacgaagggcattaaggcatgctaaggaaaaataaacttctagtagatagttcctttactgagcctgaagtaaaatgtcattggtaaatcctttctgccaagaagagaagctcggtctattgcttttgctactaatacagcttgcattgtactaattaattaaccttgtgatctgtctcccttatcatgatcaccacgtgcacatagtgattagtccatgcccgaatttgtcaaagtcgttacgaaaatctcgaggtcgcctctgcaatgtcaaccactgcaagaggaataagaattgtttgggtgctcagcgtatgcctgtgctgatcttcaaacaagcagttcagacttaatgcaggttgttatttactagcttcactgttagtataatgctagtatctgacaacaaaagataaaccctgggtttaattactatgggcgatctcgttatcttttgattgttgtctcaccagctgtacatgtttcacagtgctggagagaatggtcaaatgcatacagtgtaaggaatgaaatggcatgagcatgcatatttaagcgtattgtcatatgcataaattttgcaggtttttcaaccaaacaatttattccaagagaaagccaagacaaaatctcatgttccaaagggagcacaaaatccttgcgaaagtaagacacttgcttttgttctcaggtcgggtaaaatagagtatgtgttaagagtttggaagtttctagtatatactttacagatctgtatggtctatctttggagctctgctggcgccaagcacttgtgtctgcttggatggccaatggcaggaagcctgctacacgtttagtctctctggtctctcctccttcctatctggttgttgttgtttcttactaggaacaatcttgtgagcctttgatccgtatacgtgcgcccggttggcccgcgttgtaactaaacgttcttcgttatatcttcttaatacaaagatacgcagctctcctgcgtattctcgaaaaaaaataaagatctgtatggtccttatccaagaaccctataaatgcacagatcaaggagagacacaacatgtaagtaaatttcaagcgatagtttatggaacgggacctagcttcacctattagacaaatcagtctggtgccaaaatcttttgctgatttagtagcagtgacaagtacaaaaaactgaaaaaacttgataaataacttcactattaacacttagaatggagcaagcagctaggtttagtttgaatgggtcttccaaacaccaatgaccatgtcaaatgctaaaactttgtgccatcaataatatatggagatgactttaagaagctagcacttaggagatcatctagagaggagagcatagcgagtactagtgagaagaaaattcgtaaattgtggccacttctcttcttgcatgtactcaatggtcaagtcaagaagctccattaattccattggctttaaaagcctccacttggtctcctatgggaacacactgccgttaacttgcatgatattaagataaagaaccactacgtggcctccagcactataaatacccatgcagccttcacttggaactcatca

SEQ ID NO: 32 - DNA, 2079 bp, Setaria italica
  source 1..2079: mol_type = genomic DNA
aaactttaaagcgaaaacaaaaatatatcacaagtcaagcaatctcacttttaaggtaactgaactctactgtctgtgaacaacttataacataatttattagcacacaatttcatacagaaaaatatggtgatataccaccaaatgataccataacgctgaaactttttaaggtagccaccactaacctcaaaatcccagaacaatccacgctcactcatctttagctctctattttctccacagccgcttggccattccctgccctgcatgttttccaaagctgcttgtccaatgtccacagtagagaaaataggaatggcttgccttcagtgctaggccaaaccttgaaaactcaggtgcaaccgctgccttggagtatctacgtattctgaggtctcaacttcaaatgccttgtgtgaccagacagggcacttgttgttctataggttgcaacaagttgcccaccatggtgctactgattgaacaactggcttatttcaggcacactaaccttggtttaagttgtgatgttggggcagaacggttgtcaaatccaacagtagagagtggaggacaaagataggttaagaaagatgatggagaagggttttctcacatcttttcttattagtgggtgggtcttgggtgtgggtggataaaattggacaacctatttttagtggtattttctgaactatctgtgtgcagatctgccctataatggatatttcattataattctactgataatttatcattatccatatttgctcttacattaatgtttggcagtttgaccgcatcttttctgaaattaaaggtcctgcctaacatcatttgaatcgcctaagtactacagcctagtcgatgaattgaccagttattagaaggctagtgcaaattcttcgaaatcctgttccatcagatgttaacagaaatgtaccgagatatttgaagtagcggtaaaggtataattctgtgagagtgacaacaagtgcttgcacataaataacataaataggaacttcctctaatctacgttcaaattttatgttattactatcagtattttatttcacggtgagaacgaaaacttcaattcttctattagaggacatactattgtctgataccataaattacattggatttgtttggtctcccagcctattgtttcttttgcacctcacattgttttcagtatcccaatttggctagtaaaagaacatgactattgtaatgcagtgtttattgttttcatcatttcttcctcctctattccagggacactgttgttgctttattcgacgagctggttatcaacaccaagaagcttgtgacggcaacttcaaaagggatcgaaaaatggcgttgagctgcaccaccgcgtcattgtcgatattagctgccttcaactgcggtgtatcaagtgaagattagaagcagtgtttatcttgaacaagcagtggcacttagatctagaatccagactgtcgcatcgtatggctttctcttgctcatcagttagtagctttgtatctaagtaggatcctgaaatgaggccgacgatatctggtagatatatttagttacatgccattgtgttgagtgatgtccctggtgctgggttgctcatcacagatattaaattttagaatgaattgatgtgtgagattcagatgaactatgatttgtgcttgtgcgcgtgttcttcaccctcttggtaccagtgtgtggcctggaattgctgtcttggttctttctctatcactggttggttctccctccgtctccatctatcatgtttgttagtccctatactactgacaaaaaagttcaccagaggccctaatgctgccacatcagcgccctctaaagttgccatatcagcatcctcatctgccaagtcggcacagcctgcccaatcgcatccaagcaacagatagccctcctgggcacccagccaatggcagctcccatggccaaatctcagatgggcccacagcatcctccgatccccatttccatccatttaaactagctcaccttttcctccacaaacgcccatcagccatc

SEQ ID NO: 33 - DNA, 1365 bp, Setaria italica
  source 1..1365: mol_type = genomic DNA
attatggccaattatttatcggcctggtcctggcaggatgagtgtagtagtgtacctaatttggtaggcaatgggtttgagttaggccaataaatgtgcaggtttacatttggttgccatgttagttcataacttcatacacttccatttttgtacgtcggcgatgtttcaaccagaacagattatgtttccttgggactgtaaatttcttcatcgctccatcccaatgaacttgcaagagattcgtgttagcaaccaaaattgctctgtccttcccaaaaagcattgcctctggatcttttccgatcaagatcagaaaccctatatgtattgttcttatgttctgctgtgggtcgttggttcttgtcacccttaaacttctctgtttggtacccagataaatacaaattcggctggtgggtagaaaaaccgcctacgaacactggtttcaccttataagactactgcactgtttctagcaggcttatttttctcttcgttttttatattccaatgtatacatattaatgtttatcgagctatgatcttataaatttgtacatgcttcaatattttctaaaaacttgaataacagtatgtaaaacctaggttgatgtttcaaatgaacttatttaacattttacgttgaaacagtacatcgcgaatggcatattattttgttgcatttattctaaacaccttaaaatggaatttgaaaacgggctctaagtttgagagaagtttaagggtaatagtattctaaacacttcaagtttgagatccaaaataattaatctctcacctatcacctccaatcaagttgtttatcagtttatgccatgtacatgtatcgctggtttgttatttcacctcattttcgctatgtatctactactattgcgctaatctcaaatattagatgacatgtaaactaaaatctttggaaagattaataggatacccgcgggtgctgatatctgtttctaaaaatgttgaatctaactatttgtaaatattgatatatttttcagaaatgttggatttagtcttgtgaaatgttgaaccgatatctctgatatggatttaatgggcttaaagcttccactagccgtgtgcatgggcgaaaaaaaatcttggccaagtgttactccgtcgcggccacacgccacaagtcctcccggccctcgctcgccccttatcccatcgtacccgccacacggcgcgccaccagtggcgccgcggatgcgcctcatctccccggcggccacctcgcgcggtttagatttccctgggcccccctcgcggtaccgtcacatatttttggcgcctcttcttctgcgcccctctcctcccgaaccgcagata

SEQ ID NO: 34 - DNA, 603 bp, Setaria italica
  source 1..603: mol_type = genomic DNA
gagtagggcaggtggcgctggagattggagggcaaaccgggaagcgcgggatggagggaggcgaagcggacgacgtgggggaggctcgcggacgctgaatcgatcggagggtaaactaggaagtgcaggctggagggaggcgaagctgacggtggggggtggttcgcggacgcggaaccgagtggaggaacccagacctaggaagttttttttcaccttttttggttttttcgagtccagatagtaagtatgttgttgtatacttttctcatccaagcaacccctttcaggatccaaattaaagaacttgagctatgtccccgccatatgatcttctctgtcccttttctttaggaatataaaaacatactcgctaatcatgagattatactttaatcacgacattatacttttctttaggaatataaaaacatagtcgctaatcacgagattatactttaatcctatatatggtccccgccacatgatcttatctgtcccttctctttaggaatataaaaacattggtagccaccagcatcagagctgctctctgtatttaattactatatcgtagccaccagcagagctgctcaatccgca

SEQ ID NO: 35 - DNA, 1013 bp, Setaria italica
  source 1..1013: mol_type = genomic DNA
cgtttaatcatattttcttcgttccgttccgacaccaaaagcgagagttgatgatagctgggcgatgcttgtgccttgtgcgtttggctgggcctggtgcgccggcgtgcagatcggaggagggcgttgcgtgcccgcggcacgtatgcaacagcaacgcaaatggagccccgacagcgccgtgtatgcttgcacccaacgtctcgacgaccacgcggcacggcacgcaaaaaatctggccccggcctctgtcgcacagatctgtccaacatctcctgttcgtatgatccccctcgtgaatgcgatgcttgctaacactaaataaggtttcccctttttcctttttgcggggaaaagaattgaatgtttccctttgaaccgtgcacgccgcactgatccagccctgctcaccgggactaaaatatcgtcgccggctgactttacactacacccacccacccgtcgaccatcgccatcgacgaggtaaacagcaaagcaaaagataatcccggcctccaaacgcgtcatcggccacttgggcttgggccactcgcagggaaaaatcgtgccgaatccacatcgaccctcctatttgctattcctaccgtgcccgcgccttcgctgaacgtctcctaccccctgcgcttcttggaacgaccgcaccaacaccagagcaagggcgcagccactggccacttgttacgcaaaagaatcctatccacgacaggcggatcggggagtgggtaggtcgcggcaggtggcggtggcggtggtaggaatgaaccccgggatcgtgcgtttgtggactgccacaacgacgggtgctcgatccatgtgttctcctcaatcaaaaaagaataaaaaaaacgttaatagaatggaaaaggtgaatgcttgaggaggtttggtgggtcaacagcaacatgagagggaaatgtctttggtttccaggaaggagagagttggtgagagcgccggagtgtaaagtctaaggcactcgcctttgctttata

SEQ ID NO: 36 - DNA, 973 bp, Setaria italica
  source 1..973: mol_type = genomic DNA
atcttcgagccgttgccgtcaggaagcttgcatgaggggcggcaataaggtttctgggcagcgcttgccttcatcaacgatctgcaatgcaccatgtaaccctgcatccgagtctacacgagggctgagtgcttgatatgtaagtccatagattggatctgttgtggtttgccatcatgtgcaggaaggttacgatgcttagaagttttggttacatatgccttctatgtgttgtttttatacaccgtttatatgagtttgttacggtcaaactgtctgcaactagaattgagttacatagaaagtagcactgagttacgtaatatgcctcatgtttatttctggtagaattaaatgcatatttccaacatatatttccatagaaatattgataaaggtagatgtgggactaaggccgtgctgtgcctctcgtgcctcgtgctacttcgtgcctagattttaagttacaaggcattatacgtgccgtgcggtgcctgcactgtccaaaatttatcttgccattccgtgctttgggttgtgcaaaatatcacgcttcgggtgattcataaatagcacagcccaaattccaattttaaatgaaagtagcgcatcgtatagactcctgttcgacatcgagactatatactgataattagtaattcgttctcactttaatatgaaaactttagacgattaacctctgcacctattccttcctcaaaagttgacattacgtgccaagctgtacgctccaatttggctgattaaacatcaacacagagtactggactggacacaaccaatatactaagcttgatagtgccacttgaacttcatcacggtatcctataatcatatacaatggcatcgtcgatgtcctccaaagtcaatacacagttatctccaggctccagctgcatggcagcccattaaaagcaccaattggccccggcaaactctcaccaactttgca

SEQ ID NO: 37 - DNA, 1101 bp, Setaria italica
  source 1..1101: mol_type = genomic DNA
ggggcgagacgctggcacgacgccttccttctattcctagctcagcagtaagattccattcctcactcctcggattccccaatccaagggttcaaattccattcgtgcttggtttgcttcgaattggctatcagcactgcattcgttagaatttgtggataaatttgttaacctagttgggatcgcagtaggaatttgggtaattatgtattgtgggtgcttctgacatctgagcatcatgctatatggttgtggaggcgtgatttctattcttgagtactagttgtctcagtttttttttctagaatgactagttctctcagttgcaatgtcgaaatgtatttgggtaaataaaagttaggtggttagtcaacggtcctgtatcttattcagatttccatcgtgttagtaacaatgtacaatagtgtatccttttgatcataaacattgccatttcaacttttttttaatgcgctagtttatgttttagcgacactcttgagcatattggtctctagtattattttctgacacactaagaataagggaggttataagttataactgattcctaactctgggcgacaaataactttcgagtaatgttcccatacagcttatctttttcttttaagaaagaaaagggaaaacactaattaagcatgtgaatgtatgactgaaaaatgttaaattataggaccagtgaaaattttaatcataactggtgtacaatcagggggtggcaaaacatgaatccatatttaggagtggcaaatcacagtatcaaagctaggggcaacaaagcatgatattgaacattttcaggctagtgattacaatccaagtaatatatattcacctgttaatgttatgcatgttacaggctggtgattagtggttacagctacataattccctttttgccctttctgaaaagataaacaaaatgttttcaaataagtatctttagccacatatttgtatattgagcctggtgctatctttgcagggcaccatctcttaagagccttcgcctcatatcttgctatgatgtctccaatgaagggtttgcagaggcaataaagaagcttcctctgcttg

SEQ ID NO: 38 - DNA, 1998 bp, Setaria italica
  source 1..1998: mol_type = genomic DNA
gcaatcgtttatcctcaatctgtctaagcaagcaaaaagaatccatcaaaatgaggcaagcgcgcatgtgtgctcgccggcaagctgtagggaggcattttccgtcgagaatgcgcgccctccgcgagcctacttgccgccacgttccgctggccgccaatccatagccccgttgtgccgcctcgctcggccctgcctgctctgctccagacgcgtggactcaacccatgatctcgggggtgaataggacttttttccaaaagaatcatagcccgagagcgagaacaaccaaccctttcatgacccgtgcgggggatgcgcaaaaggaaaggaatttcgcgtgagagtccttgcaagtttcaaccgtcgctacaaacggtgagggccgaatttcgtgattcaaacggactgggcctaggcacggaaataaaactaaccccgagtaccctcctcctctgtccgcatgcgactcccctcctcgacgccgaaaccctagccgcgtgcaccggcgggaggtccaggatccagggaagtcggcacaggtctccggactagggcggactagcctcgcaccgccagggcggcaggagggcagtcgacagggtctgagcggtgggcaccaaacctccacagtctcgcagagatagagacagagactaagaccgattaaggactgtccgagaggtgaattgcagcatcttatgatattttaacttgcttttactgttaagattatatacatagccaaaatagaaacgtagggggtagggtatgatgtattaattaagcggggaattgagacattgagcatttgtattgtacagtggaacatgaagatggatgattgttagtcacattcgtatctgtatcttcaaagcaagtgaagatgatcagatttatggccatgagaagacataatcctgataagaagtagtattgtagtgtaatcttctttgaactactgtagatgtgtaaacttcttcaaggcaaatttccgatgtgattgtttgctttaattttttttaagacaccttattgatgtatcattttgcgcttttggcaaattctatacttgtatagcttggcatattacatttgtgttgttaaaaaagtttatgccaagttggaccaccccaactcaaaaccctggatgtgcctccaggctccaggtctccttccggcaccccaagtgccaacccaaggtacttggttctcgcagttttgcctctaccttgtactattgaactggcgtagagtggtgatcaatccccaagacttatatttattgatctcttttgtttgtgctaaatgaaccataacttgcttttattgttttgttctggcattgtctcttcttgtctgtccaatcctttactaatgctggtttatttccagttatcttttaattcaactaaaacccccgcaccacaactaattgatagacagggagtggggggatagggaatttaaaatctaaatgatccgtcaactaaaaaaatattgttttcttaattattttgtacaacaacaataatagcctttcagtcccaagcaagttggggtaggctagagttgaaacccaacaagagctacaaatcaaggtttaggcacatgaatagctgttttccaggcactcctatcccaggcttaattattttgtaatttataaaaattattccagagatatccattccagtctaaacaatttgaacatcatattttgcttttaatcttttatgaatctttgatttactaaggtgcccttctttgttcatttcattcatcgtcctagaagttctgggtctgcgattgccaaaaagttgtaatgatggctaatgaatttgcattactctgcactttaactattctgttcaaattgcaatcatgtctctagttgagcttgtattttctaaccatatatttgcatcaaattcataatgtggtcttgaaagatgtagtaatgacatgtgaaactggtgtttattctatagggatacc

SEQ ID NO: 39 - DNA, 496 bp, Setaria italica
  source 1..496: mol_type = genomic DNA
gggcagcgctaccgctatggagtgcctaggcaccaccgtatcgggggccgctcaagggaggatagagggaggaggatgaagagagagggggaggaagagagggaaggaagacccaccaccacttgttgcctaacatgtggatcaagcgccacatcatgcgaaaccaccctcaaaacagctatgggacaaaaacaaacggtttagaagttgagggatgaccgatatctagttttgcatgtaagggatgaaactcggacaatagcaatagacgtgggaccttgaaaggacttttttccaaaataaaaaagacacaacgcgtaatttgggccaacggtcacaggccgtgggctaacatcctcttcggcctgctgcagcccaccaacatcatataatccgccgcaagcccgcgagctccatcatctacggtctaccgtctacccctgtccggcccacgtatccgcctcttcttcctccaaccgcgacgtccccccgatcc

SEQ ID NO: 40 - DNA, 1148 bp, Setaria italica
  source 1..1148: mol_type = genomic DNA
ggtgacgagcatggacagtggcatgcagcatgtggatgggaacgccgtaacaagtgtcgattccggaggccacgggggtgtccgggacctccatctcgggactcgattttcgctaggacctcctctggatgtgacttgtctcttctgtgcaccgatgcacgctgctgcggcgtcggcgattgcaagcatctctcgactgcactgacgggcctctccctcgtatgggtagcctagccatcaactttcctgccctgtttccttcccgcacgcaaggctatgcaacaaaacctttgttagctgccaagctgatggcttttgctcgcttggaggcgacaggtgttgatacctcccatgtgatcgttgcaacagagaacctcgtggagttgtgggagtactagcgtccacccatgcgttaggaacgcagtatccaaccattccaacccccttctggccttctcaactatttgtcaaaattgttaagttaactaaacaatacaaccctgcgttctttttggctcatattgttatttgttcgttccgacctatatagattatgttttatatctctacaatttgctcttgttgtataaactacatgttcaactgatccggttagaatgacatgataatgataatgataataataatgatggtggagggtgcatagtacaaactcccattccataagatggtataatttgttctagatatatagactttttgttctatgtaaataaaattttgctcaacttatattcactttaaaaaatggtagttaaaggatggtggagggtgtagcgttttgttatgtcagcttttgtatgattcgctctctgtgtataatatttttttcacttacataaattttgttctagttaagatggcagtgtgaggagagaagggggcagatgacaacacccggtatattctctctcttcttcctcttcttgagagaggagttctctgtctcgaagaaccttttcatattcttcttttccgcaggctccccggctccatgggccgcagcctgtttgtgtgtgaacggaatagcggcccagagaacgcgcgcggtcgacatggtcgcgaatcgcgatttcgctgccttttttcttttcccgtttttataaataaatcagcccgaaaaaagg

SEQ ID NO: 41 - DNA, 1603 bp, Setaria italica
  source 1..1603: mol_type = genomic DNA
gcataaatactggcgaaatgttccttgtgatctctgatactgacagtgttgctgttcagagcttcaagtgccgtgtgcatgttgaacttggggagctaccagcagtgagtgctagtttgaagttggaaccaaggcctagcttagctttgtatcacatcaccgttgggatttcctgttttcttaggttgggtttgaattatgtgctcctcttaatggaaaaaaaaagctatactaccaagttcgaattccgattcagacccggagacatggcgcagaaactgctgaacatacggcgacttgtttggatggtcgtggtcctcgagatcgcgagatagaggaaaacaagcgatccatgtggatttccatggaagcgataggtagtgtggacagaggcttgttgaattctattccatccactctaaacagtatttggagcgcccgctatagcactgtaaggtagtggacccaagatagtctatttggacttcgaagccattaatgtccactagtgcccagtatcgtggtcgctattgcttatgttagacagctattcgctacatttatggttaaagtgacataggaatatgaatcaaacagtaataataatatttaaaatgattattcaggtaatgacgaaaaattattgggatgacaagtgaattttttttattcattgatacgaggatttaatgttaatatacatccatacatcttaattatactatttatttatgattcgtaccatgagatgcaattgctaacttgaaactaactttttttaagtgagcttgatgttaatattcatatatcctctaaaattgtgactattttctgaattccgctatttggacttagcgtccgctatagcactcgctatccgcgatctgctacaccagcactaatccgctaccataccgctaaacgctatttagtaccttgcccagtggcccggagcgttgtttgtgttgggccagagaactgtcaggtacgcgctgcacatccttttgctggttcagtggttctgcattcatctttgcacactttgcagacattgggctatgtctccgtgtgctccaatttgtgaaaatctgtaaatggaagacaaataggcatgcatgcataatgatcatgttgtgtacagttggctatgcttctggcttgaataatctttgtttaattatcaacaaaaagaatctttgttcatatgcccccaaacactttcagccaacgtacttgtcttaagtacaagctctattgataatagatgaaatttagtattctacgagtacgctggagcaatattgctattatttgggatgtgctcttccatcttcgatcaactttacgccgcatgatgcatgtgtacacaatgagaatacttcttgctggtctagccactctgaaaatcatagcccatggatatgaacaagtactatctacttgtacaccctacaatggttaatccaaaaaggatcggaagcattgatagaaattatgagaactgcaggaaacagtgaaattgtttctaactaattagtattactgaaaaacatatccttcttcataacatacacaaactattatttctgatattaaaactttg

SEQ ID NO: 42 - DNA, 1588 bp, Setaria italica
  source 1..1588: mol_type = genomic DNA
tggtggagatgtattgtggtgaacatgaaatcagttgatgtgttgtttgtctgaatttctatgtacctggcacagtgaactggaaaatatcttaggtggaaagcacaagtcactagaccatttgcgctggattcacctgtgtgagaaaactgcaacattttcactttgttagctaggaagcaaggccatgttccattggctgcctggctgggcatttttaggactgctccgcttaaaaaaaaaataacttcactccaccaacttaaagctccactccaactaagaaaatagggagctacgaggttaatagtgtaaacttcagctccaaaaattataggaattggcgagaatggtctctcttgcccttggttgggattgatgtttttttttaccagctacgttaaccgactgctacagtaccgatcgctacggtaacactttgctacatcgcttcgcctactttgcagacttcattgtgcgcagctgaccgttggaatttttctggaataaaactccgcgtcattgtaataaaggatcacttttgaaaaccagcacgatcgtcatgtgttcgtatgaggtcattcggtagtccatgatactgaaagtgatttgtatccttttccaaaaagaatccgcagaaatcttcacaaagtaagttgatttggactaccataagaaatccagtgctctcaaatgttgcagaatagtttacgtcatacgcgttgaaaattatgccacccgaagattgcgaccatcttaaagcattgaaaattgatgtggcctgcgacattgggcccaggagatgaatcatccagcatttcagcaaaccgggctcaccaaggatgcagatgaccaaattggggtgaaatcggacgccagaggaaggggagatggcggcgacgacggaatagaagagtgtgagagggagggagaggcggcagcgatggaagatgaacaagcacggggaggtgtcaatcttttttccccctaaatcggtatgtgtaattggtgacattagtgagtaattttcaactaacttctattggaatgaaacttgtattttcgaagcaccctttgagaagctccagaaaaaatcttgaagttagctcctagatgcatattttttccttgaagttagtattattagagctagaaatgtttggcaagataattttaaagtggagttagaaaatctaaagcgaagcggtccaaacacgcctttgagatccgttaccgtcaacaacagaagcagagagcttcacgcccattttgagttccaaaaccacgtgatctccaaaatcattttggccgatatttcccagccccaggcactccgaagaccacaaatctcaggcgctccagacgctctcctcccaatcacggccctccacgtgtcccgaggccctccgccagcagcccatccattggaccatgcagataagacccggataaggcagagcccatcgctgccgtcaaatagatcacatccgtcccagggccgtccgatctgccacgcaggagatagcaccggaactctttcttatttgtaccccgggacgagccctctccacgccacacaccaccacca

SEQ ID NO: 43 - DNA, 1129 bp, Setaria italica
  source 1..1129: mol_type = genomic DNA
ccgatgtgattggatggacaatctttatatgtaggcatcttgtcgcaaacttggtatggttattccggtatctaaataacctcatattttagaaatatcaaatgcaaaatttatatcttagccagtttatcaattttagattactttcctaagtgaaacttgtttaactttgatcaagattatagaaaaatatattaacatctataatatcaaaatatatttcatggtctatatagtgaaattagtttgatgttgtatataattcaccccaactctccctaaataaaggaggagttgtggtgactctcccaatacaccgttggcttaggatgagattaatgagagactgtaaaagcaactctcccaataacagtgaaagtaatattagtatatccctattaactagttattggtaactatttactgggagactgctggaggtgttcttagttaagcacttcatgttcatgtatcgtccttttattaaattcttactagagttttatgtcatcattttgttctttcaaaattgttgtcactgcgctacatagtccattataaatcatgtatgcatagcatattaaacaatagtcatacatatttttagatgtaaaaatgaatcaattaatatcatattttttaaaaaaaatggccaaaacaatgaacggtaaacatattgtcaatcatcagtgaagacggagaaggttttacgactaagataaaagcaacattgcagtggggaacacgttggagcgctgatttttgcaataaagagcgtcctgaatcacggcaacttttaagtggagtctaatattttgtagcgaaaggttgcttgtcaccctcaccggcacagatcgcctacccatggctgacaggccccgagtgtctgcctacgcttgtgcccatttacttgggtcttacgttgttataatcttattactgtcgctttaatcacgagagacgaagaggttgtgcggtaagactagagcaacgttgcagtgcaggacacgtaggagcgcagatttgcagtaataatgtggcgtaagacagcgtcttggatcaatcattccacgtctcggagttaaatttttaattaatagcgaaaggtagctggtcaccctcgtcggca

SEQ ID NO: 44 - DNA, 374 bp, Setaria italica
  source 1..374: mol_type = genomic DNA
ttagagacgaccggcgcaatttggttttttttcccacaacaactgatgtacacatcgttctcataaaggcttccaatcaattgtggtttgtgcattgcttaataaatgtcggttagtgcactatttcactagtaaaatttaggacatgctggttgttttcatgtaatttattcaaaatttcttgtatttcagttagaagaagaagaactgcacgaggaaaagaagaagaagaataagacagggcccagcagtgcattttcaaatcttttgttgccaatgattgagtcatctttacaaggaccacgacgaatcttctctccgaggaactcctataaataccggcctgcagctcggatccatcatcacacaacaca

SEQ ID NO: 45 - DNA, 3277 bp, Setaria italica
  source 1..3277: mol_type = genomic DNA
ggtgggttaatctttatgggtagtttagtgttggcttgcaactttatcatgaaaataggttgtatagtcacttgttggcttgcaactttatcatgaaggaaagttgtatagtcatgtgttcaaaagtttgcatctctaacccctgcatgtactaaatcgtagacactgaagctccaaaagtggaattcttggatttctctgaagaaccttcggagtttgaggagatttttgagttgatcccctgtgaagccggaccttcggacaacactaacctttttacagatcaaggcaagccccggtgcatctatacctacctactttggagttattatttcatgtgttcaattgttggttattttccgtatgaatgcattaagtctaggagttgattgaaacctattcttgtgcatgatcctacctgatttagaggacatctttgccacttgttcactaattagtaactatcctatgcttagcaatgcttagatacttcaagcaacttggattgcttagctctaaggaaaattttggtcatacatgttagttaaggaaaaatagcctggaaattggaaatgcagacagaagctagagatggtagttctgtttgctaagttaatttggttaaggcccgatcgttgtcttaacctttgatcaagtgagttctacctggttgcttactgggtatgggaccagtaaagcccggtaggttagttggctctttgatcgggaatatttcgtacccgtgcttgacgtgctggagaatggtaggggcatagcctgaaactcacatggagatcaggccagacgtggggtcccatgtggggtgcgtccctgggttcgggtagtcatgttcccaatttttgggtacggctaatagaaaggtcattatatgcaacctagacagttgtacatagctggtggttgggtatctcctgcaggatgtaaattgatccggatcgccgcaattctcggatatgaatgcacttgatcaccgttaagcatcatactgtaatccagttgaatataatgtttttcctagaatgaatatgctgtatgacttagttccactgagtgctcaaaatgttttattcatctagactggttaggtaacaactaaacaaaaataaaagaataaagttaaggttccacttatagtaagcctttccgcaaaaatgtgagtccgccagtatactaaacagctatcattcagtttttggaaaaaaaaaactatctatattggttaatcgggtcagtcttgctaagtaccctcggactcaggggaatccttcgttgctatttcagaactacagcaagagtccgccgagggagaagccccgaagaattagggtatttttacgagtctcataataccctagaaataaaactcagatgtttaactttcacctggactagtttatgttttaaactcttagaactgttctgacctgcattgttaagtttgtttcaaattatggttgtaataattcgcacctcgatatgtatgtaaaaatgtaatatttgttgataccttcccatcgtggaagtgatcctgatgtatggctatggatcacgtcgtggatgtttcgaggagtcctaaggacactcgacggaataccggacttagactgttttaagtgcgtttcggataattgttgttctgatagcgattagacgcgcttaaaccagtttaagttgggcggttccgccacactatcccttattactgattttggtttggtttgggtccatccgagatgaagaagaggcaagcacatgtactggaataatattcctggatcgaaggtatgagcatcacacatttaaatgctagtattaagaagaggcaagcacatgtactggaataatatccgagatgcaagtttacaacaataactctggcattgcatcacctgctcaacccatgtccaatcacatgataatcctaccaaacttagcacgagctgaattaaaattttccttaatccgttttatatatgtacaaatgccaccattgccacataaatgcataagttcttcccagataattctataggccaccattgctattttataagaatccttcagaattttaagctgaaaggaacttgactaaaggaggaacaacaaggatagagtctagtgctccatcccatgctacagattttagttcagttttcaaccaacaagaattaaaatttattttctagcaaatgaaaattcaagggtcattttcttaaggtttgaagttataccattttgcatatatatcataagtatacaaactttagccatataatttttgctggccacaccttggctactttataaagaccctgcacaattttaagataaaagaaattcggcaaattaaagggagaaacaacaaggaacgagtcaggtgccccatcccatgtttccatcgagatgaagaaggggcaaagcacatgtacttgaatatattggatcgaaggtattatcagcatcaaatatttgaatacgagtagtattaataactttgagcagcgcggaaggttcttatggcctcagtgatagctaatctaactttacaatatctctgacattgcatcacatgctcatcccatgtcacatgataataatcctaccaagctcagcacgagccacatgaaatttcttaatcctttttttatatatatataaatgcaaaagattggatcagagcaagtagctaagtatcctgcatccctcttcatgtccatgaatcatatccccgatgaaccacataacctccttttattctttcaaaacaagttaaaaaattttgttctagaaaatgaatttttaactctggttttcttaaggtttgatttttttgcgtctatatataagttctttacagataactgtacctttgctagtttatatgaatcctgcagagtttcaaggtgaaatttaaggaacttggaagtgggagaaactgaggatcgagtccagtgctttatcggtttatcatcccatactaatgatttctttttgttcagttgcatgttgcaaccgggatgacgaatcgaatatgcaaatcacatgtacagggtttactggcatcttttttggatcgaaggtacgagcaccgcatttgaatatgagcactgacgttaagcttcgttagtgggtgaggttttgcactgtgtaaatttctctactcgtgattccagtgatctgcataatgtcaacggccgtataggagcaactactatttaagcatccattcgcccatctatttcgatcaacgctcact

SEQ ID NO: 46 - DNA, 2020 bp, Setaria italica
  source 1..2020: mol_type = genomic DNA
gctaagtaccctcggactcaggggaatccttcgttgctatttcagaactacagcaagagtccgccgagggagaagccccgaagaattagggtatttttacgagtctcataataccctagaaataaaactcagatgtttaactttcacctggactagtttatgttttaaactcttagaactgttctgacctgcattgttaagtttgtttcaaattatggttgtaataattcgcacctcgatatgtatgtaaaaatgtaatatttgttgataccttcccatcgtggaagtgatcctgatgtatggctatggatcacgtcgtggatgtttcgaggagtcctaaggacactcgacggaataccggacttagactgttttaagtgcgtttcggataattgttgttctgatagcgattagacgcgcttaaaccagtttaagttgggcggttccgccacactatcccttattactgattttggtttggtttgggtccatccgagatgaagaagaggcaagcacatgtactggaataatattcctggatcgaaggtatgagcatcacacatttaaatgctagtattaagaagaggcaagcacatgtactggaataatatccgagatgcaagtttacaacaataactctggcattgcatcacctgctcaacccatgtccaatcacatgataatcctaccaaacttagcacgagctgaattaaaattttccttaatccgttttatatatgtacaaatgccaccattgccacataaatgcataagttcttcccagataattctataggccaccattgctattttataagaatccttcagaattttaagctgaaaggaacttgactaaaggaggaacaacaaggatagagtctagtgctccatcccatgctacagattttagttcagttttcaaccaacaagaattaaaatttattttctagcaaatgaaaattcaagggtcattttcttaaggtttgaagttataccattttgcatatatatcataagtatacaaactttagccatataatttttgctggccacaccttggctactttataaagaccctgcacaattttaagataaaagaaattcggcaaattaaagggagaaacaacaaggaacgagtcaggtgccccatcccatgtttccatcgagatgaagaaggggcaaagcacatgtacttgaatatattggatcgaaggtattatcagcatcaaatatttgaatacgagtagtattaataactttgagcagcgcggaaggttcttatggcctcagtgatagctaatctaactttacaatatctctgacattgcatcacatgctcatcccatgtcacatgataataatcctaccaagctcagcacgagccacatgaaatttcttaatcctttttttatatatatataaatgcaaaagattggatcagagcaagtagctaagtatcctgcatccctcttcatgtccatgaatcatatccccgatgaaccacataacctccttttattctttcaaaacaagttaaaaaattttgttctagaaaatgaatttttaactctggttttcttaaggtttgatttttttgcgtctatatataagttctttacagataactgtacctttgctagtttatatgaatcctgcagagtttcaaggtgaaatttaaggaacttggaagtgggagaaactgaggatcgagtccagtgctttatcggtttatcatcccatactaatgatttctttttgttcagttgcatgttgcaaccgggatgacgaatcgaatatgcaaatcacatgtacagggtttactggcatcttttttggatcgaaggtacgagcaccgcatttgaatatgagcactgacgttaagcttcgttagtgggtgaggttttgcactgtgtaaatttctctactcgtgattccagtgatctgcataatgtcaacggccgtataggagcaactactatttaagcatccattcgcccatctatttcgatcaacgctcact

SEQ ID NO: 47 - DNA, 3508 bp, Setaria italica
  source 1..3508: mol_type = genomic DNA
ttttgggacgcgagcagctttagagctgggatgacggcctctcttcgtgtgctcgaggcgttgcgtcaccctaggttttccctaggccagaggtaagatagttttgcctgcggcaacgcctttagtattggaaaccttggctgctttcttcaaggctttctgctccaaatgaagaatatttttcttcgatgcctcgcgaacgggggcctcgacgctgaagaaggaaaagacacgattcccccaggatccacccagcctcctttgaacctctttgtactccgaaggagattcggcaccaagaataaaatcaccacgatctttaaccttaatggaattgatctctacaaaatgaagcgcaggaaaagttatgtaacgaagagaaagcatgaagaaaaatcaatacagaggaggacaagcgtagagtcttaatttctttggtaaacttgaaacatttcgaccaatccgggcaagggataggccctttggtatcagtccagtcggagtccagaattgcccagctacagcggacaggccacactccaagcatgcggtactcctcgataatatcgcaagtgctatacttgcaggcaaagagacgaagcatcgagatgaaggcatcaccctcggcacatgcgggagggtcaatcttgtaatcatcatgaagagcctccatctttttagtgacgaggcagttgggctcaccagtctcttcaggctccacttcatgatagagctagtgttgatgccaatcgataggccacttgttgcgatatgcagccacggggttcaagactccagtgcgttacatgaagttgagacatccaaactgagcttgtttcccgaccactccattagcacttctctccaacaagtacttcagctggtgatgcaccttgtgagcattagtgaaactgactgccgaggacttgatttttgttgttttgcaaatccacatatacgtcgaaagatgaacgagagcgttgggtgtcaactgatgcaggtagatatcatacagacggagtatatctataacaattgggtccaactcaaaacgaagaccaacataaaggagatcacggaagatgacgaccttgttgtcttcgggtttcggaataacctcagaattgggtgcacggctagcaaagaccatcttgttctgcttcagtaagtcgatgtcattgggatgaagcaagcttcagccaaaaacaacagtctttggcataatctgatcaccatcgtcacccgaagggcggttgcattttggggccattgaatacaatgaagaacacaattaagcaaccaaaatgaagtcgtcggaagaataccaaacccagtgaagggggctttagacctccatcaaagaaagcgatagcggtaaaagtaaatggcacgagcccacacagggttatttataggtagagcgaaagagaaacagtaacaagggtcaaaagtcaaaaaaccattaaaaaaatttaatgaaggatttcgaataaggaaaaatatattaatcaaagggcaaggaagcaaaatcatgcatgggccgatcttggggagttccgaaggatggttgcaccatgtgttttaggatcgtaagttcagcccatcagaggagaagatggccctcgctcacgaggggctactattggggaaaccaccttgggaatctccttcgaagggagaagtccttttgacactaaccatgacagctagtttgctttgtggcgagctctaagtgcagggaagaagaaggcggtacgaagagctcttaggcgtatgagggctccttcggaacaaaacaatggctgactggcccgcgggtcttttgggagggccggcatctgactcgtcccctccaaggtttgtcctcagaggaaaggcatggagtggctcagcaaagagcacctcgacttccgaagatgaacatgcgttgaaagaccatgctgtccaccacatggattgaaaggaccgtacgaggagctagctggaggagtccatacaaaagatttgcacttgaagaaacccaatctgtagatcataaagccaacgtccttggaaaaaaccgagaaatgatacatggcctcatagaggtgaataattcgaaatcactatcaattcctccaagacatgattgcagaatgaggctaacagaatccacattgagagggatggaggatcgcccaaaagaagccaccaagaaaaactcattggaagagaaggcgtgtgagcaactgactggcaaagagaaactggattggatcatgcattggatctccaaacctagaccaaagtccagatcagagaggccacccatggtatggtagcctagaggaaggatcaccatgatcgccgaggaatggagagcacgacaccggggaggagggggacatcgccagtcaccatactcgcattcttttagcgtctgctcatctccacctaccctcccctagtcccctatctagttgcagtgcccaccactagatggtgccaccacgctaacctaaacgtcaagtctctccttccccggcaccgccccctatctagttgcaatgcccaccactagatggtgccaccacgctaacctaaacgtcaagtctctcctgccccagcaccgcccatcagcaatcgttgcctgcccacaagcacgacacgatggcacttatggaatcctcttaataccaacactactccaatccaaaaatttaacattgcagtttgattttgctctcgacctaaagaatcacaaaaattaatttaggtgtctggaatctatgaagtgcgagagagtaattaataaatcatgtatatatgtccagttgttgtttggggaaacctgtctctgtgcaaaagcagggtcctttgcccatgtacttttactatcagtcaacaaggcagcattctctcataaaaccacgaaagtaaaggaaccaagaccatcacagactccgtgcatgagttatgacatgtaaaggaaatcagccctggacaaattcaattgcagaagtccacagaagactccatgtgtgagtaatgacatgtaaagccaaatcagcctggacaaattccgttgcagaagaccacagtagactccatgtatgagttaagagtatatgacatgtagagcatatcagcgcctggacaaattcccttgcagaagtttctcgatccacctcagctagtcacgatgcaatcaccttactttagcaaaagcaaaacaaactgagatatgcagtcacatccttaataaactcgtcatactaccctcaccctattatcaaaagtaagaacaacaaaatacttttcccatgtaccccatgctgaatatcatggaggcgatcatgtgggtccaaaaacagttagggaaatctccaaatttgactagatgccatgtcacctccagcttatctaccctccaactttcagttctgcaaatgacaaaaaccttattgatctgcacggtgtttgtagcatataagcactataaataggacctagatgaatgctcagccca

SEQ ID NO: 48 - DNA, 1008 bp, Setaria italica
  source 1..1008: mol_type = genomic DNA
aaacgtcaagtctctccttccccggcaccgccccctatctagttgcaatgcccaccactagatggtgccaccacgctaacctaaacgtcaagtctctccttccccagcaccgcccatcagcaatcgttgcctgcccacaagcacgacacgatggcacttatggaatcctcttaataccaacactactccaatccaaaaatttaacattgcagtttgattttgctctcgacctaaagaatcacaaaattaatttaggtgtctggaatctatgaagtgcgagagagtaattaataaatcatgtatatatgtccagttgttgtttggggaaacctgtctctgtgcaaaagcagggtcctttgcccatgtacttttactatcagtcaacaaggcagcattctctcataaaaccacgaaagtaaaggaaccaagaccatcacagactccgtgcatgagttatgacatgtaaaggaaatcagccctggacaaattcaattgcagaagtccacagaagactccatgtgtgagtaatgacatgtaaagccaaatcagcctggacaaattccgttgcagaagaccacagtagactccatgtatgagttaagagtatatgacatgtagagcatatcagcgcctggacaaattcccttgcagaagtttctcgatccacctcagctagtcacgatgcaatcaccttactttagcaaaagcaaaacaaactgagatatgcagtcacatccttaataaactcgtcatactaccctcaccctattatcaaaagtaagaacaacaaaatacttttcccatgtaccccatgctgaatatcatggaggcgatcatgtgggtccaaaaacagttagggaaatctccaaatttgactagatgccatgtcacctccagcttatctaccctccaactttcagttctgcaaatgacaaaaaccttattgatctgcacggtgtttgtagcatataagcactataaataggacctagatgaatgctcagccca

SEQ ID NO: 49 - DNA, 637 bp, Setaria italica
  source 1..637: mol_type = genomic DNA
cctgagagattagcgaacaagccggacgcattgcgcagattgaatagcactccgtcaaaaacggaccgagccattcaattccacatcgatgccctaactttccattgtatctacagcgacatactaccaccaggccatcgtatgtagattctgggaacacgattcatacccttctgtcgtcattgcccatagccgagtcaattatgcaggggaggcatggtgtcaaatgtcaatttgaatcagtaggagaatcctacatggattaaagctgtgggcacaatggaaaatgaggatacatccaattgaccgatgacagaattctccacaagacaacgtggaggggctagatcctattttgatggagttgccttcaatctgcagaacggtggaagaagcgtcggcttgattttgcccagggctcgactctcctcgcgcagagtgcggtgagttctacagtctggggcggttcgagtggatgggctactctcgataggactaacaggacacgcgtcgatatcctgcacggtgacgcaggggtgcggtgcgacaccgctgcaaagaattttttttcccacgtgcacggacggggcacggctatataaggtcatcgtttccaaggcttttctctgcgccgaga

SEQ ID NO: 50 - DNA, 2161 bp, Setaria italica
  source 1..2161: mol_type = genomic DNA
aagctagcacagattatattgtccacctactctgcatagcatttacaaagattatgccttcactttgacgtgaaagaatgaaaactggcacatcttttggtacatggatcggaccacctagtctccttgaagcacgtctgtgtgtttttcttctttcgaagttctagcaatggaatgctgagggaaaagaagtacaagaatggagcttctgaaactttgataatttcttcaccaggaaactttggtaacttctcaaagatctagcaagggtctgccgaccgaaaaggagtccagatcgagccggagtctcgattcctgattggattggaaaagagacgacggacgccgagattgatcatatccctaacctagctctgcctctaagctacaaaggtcgagtgcgaggctaaccgccgcggatcgattgagtcctcatcgcaatgaagaaacacaaagcatcgagctcacggcgcgcggaggcgcaataatggggccgaagcgaaagcgacgacgattgctgcaactggccgcaacggcggcggcgacggggctccgacggcggtgaaggcggtggcattgccggtggagttcctcaggtggttcctggcgcagagcagcgaggactaccgcgtcccggccctcgacgactactcgccgtcgctgggacgccgccgaggagcgggagacgacggtccgccgggtgagcgccgacgtccaggccacgaagtatggcttcgccgcgttccatgcttgggtccgcggcgtcgccgacaaggacggccgcgtcgtgctcgggcgcacgtccaaccctcgggagctgcaggagatcatcgacggcgagtgggcagaagcgaggtgggagctcggcatgggggatggagatggagttgtcgccggttctgatgacgctgccggcaaggaggacggtgagggcgccatggcgtcgtcgtcgtcatcgtccaagatgatgagggtcccacgcggcccgcatctgcaaaccctgtcgatctacctgtctctgatctaccagcgcatgacataagtttttggttagggtcgttcatgtcacgtatatccatgtcgtatctaacttaggcagtctcggtgggagtttcctgaagagtttcatggtcaataaattccatactacatgagcaattttgctgacttggtaaggtcgtaaagtaagatctttacgaggagattccattggcatccaaaatcccctacttgagtgaagtggttatgctcggagttaccttcacgcttcatgatatttgtatttcttaatatatacttaaaaatggactgtctactggtaacccaggtgttattctggccacaatcacccgggtgatttgtaggggaataacacccggttttgaagtggaaaaaaaatccaggtgctgcaaagagatctgtcacctgaaagttctgaacctaagattctgatcagacgattaacaaaaaagattatataaacaaggaaaagcaaaatagctgaacatattttttctatggtcagccaaagaacaaataattctgggttagtggaaactctaaagatgcaaacacagcatgcaaatttacacagatttaaaattacgcaatatacaaattgaaattacagtaacaatatcactgtaagttacttactgtatagtgtaaatcattaagaatcctaatgtatatgattaagaatcctaatgaatatggaatactaaagttagttactaatataatgtataacgaaaggagagaggcaggagagatccttggcaggcaggcagagggtttgaatgaggagcaggtccggtcgtcagaccgcaaactgctgccaaaaaattaaatgcgctgcgatctcgcaaagataggatagcaccccccaccgctgtgtctactggtactccgactcgcaattatcacggggcggcgtacccgccgcctgcagaaaagaagcccaactttgatttggatcagaacggaggaaaaaaaacagatcgtcagatcggacggtgccaaattcaggtgacaggagctcgtgaatcacccaagcaacgtatagcttttccccttaaaaaagtatgtcaacctatgtacgatgtagagttactagtcgtgacgaaacaaacatttaccaaacacacttgagcagatagat

SEQ ID NO: 51 - DNA, 1847 bp, Setaria italica
  source 1..1847: mol_type = genomic DNA
ctgaagattcctgtgggaaaccaactgatgtagtttctaaggaaacagagttgaagaagagtgtttgctcaagctagacctattaatcaatggttttgtcatgtcacagtcttctgtctcaggaacgaacactgcaccaattcagcagttgctgagctttagcaacacacgtgaagtggaatctcaatgtgctctgagagtctgagtttcacaatgagaagaaagaagtgaataagggatgtggagtaggagtatgcagtcattcatcaatggctggcactatagctggcatgttggttcctgatttacatctacagagacacatcaaactaagtttgacactatgtttgactaaatcagaagccaacctcatccgaatttaactgttggtagtattcccaccatctttggcatgaatttgctgccaaagttatatttatcatgtacgtgaacagattatatcactgattttatggtcattggcagggatgattggatcatttcaaagatgcaattttttctccttgtgacattattcacattagtcccagacatgatcaattggagtacagtaggaaaatgattctttgtacagaatttaccatcatctgtaatagacagtataacagatgcttccagtgatatgtccagatccaaggtttgcatgtgttagaaaacaccatgcacagcatcttggtgatagtggaactttttgtttgtattagtattatatctcccccctacaaaatgacaaaatgtttgtatacgcactggccgtttgcgtttgtatgcacgtatttctccaaactctgatagttacagcagtccatccaatttagttttatgcagtctgaaatccttttcatatacatttatgtgcttgcaaacattctgtagctgtccagcttttgtgattcaattgcaagatccctttcattttcatcgtactttgtttctttccttttcattgagatctttaggtgctatgaagccaatttgctccctggtaccaaagtttattgcaagaggcagaatttcattttcttcctttttgcccttcagtatttcagaactatttttactatgcaagatatgatatttgtaccttctttcttctcccagttggtctgttaatgtcagagcactttgtaaggccatgaggggggaatatgctgctgtatggttggaatcctgttggtggcatttttggcagggagttgttcaaattagtggtggatgtccgctgcaagcctgcaactggactccagaagcagcagcatattctcaggagcaaggatgtgtgtcaaagaaggaaccctgcatgcaacaaacaacggacggctggaggttgatgtgtgttaaagaaggaaccctgcatgcagcaaacaacggacggctggacgttgttatcaccaaaatactggctgtaaaatcttgtgttttttcgggaataactggcaacgggacaatttcatggatgcagtatatcagggcatctccgccgttggaagacacgtatgggctacagttcttggtgaaatccacccatagaaacccagaagccaggatccatcttaaggccaagaatgcgcagacaatattcaacggaccacgttgcacaaagaggaaaatgtttcttttgccagttttacatggtacacagaaaagagaggagaaataaagtatctgccagagccaggacaaaagagagggtggcaagaggattgcaggaatccagaaggctagcctccacctcacaattcatatctcttgtccttgtgtgcctccagttgcgcaaccttatatgccagccggtgcaacacttctcaagcccctaaggaaagatt

SEQ ID NO: 52 - DNA, 1995 bp, Setaria italica
  source 1..1995: mol_type = genomic DNA
ctgtcactgtctcatttgcatcaccactagctcgatcactagattcagagaacacgcgcaaccgaacgagctgaggcaaagatgcatgaacagaggcatacatgtcccgtgccaagcagctggaacaagcatcccgtcgccccaggttctcatgatctgatctgccatccctgcagctgcagccatcgtctcctggcccagccaaaccccccctgatgaatcgaggtaggtcgctcacatggacctcgtgcagtgaatgggattcaaggatcctctgaaccgatcgctgcaagtggttgcaggagggagagagaggggcctaaaagagggggcagaaaggagctgcgcgcgttgccaatccgagcgagatgcccgaaacgaggcgggtgaaagcccaggggagatcaggacgagatcgtgttgggagcgcgtccaaatcatcggagatcgccgaggggtcgtcgaggggagaacctactgtgaagaaagctcgtgcgctttgtcctggctcgctgagattgttttggtcggccccagcctcactccccagatgtggaaactgaacactggggctccattattgtgccctctgtatagaaaccttggcaggccaggggaccagattaggtgctcctttcctttcctttgttcattcatctgtgaacactgaacacaaatgttattctcttctgatcctctggtgagtttacatgtggaggcaggttttctttgctgatgcaaactggcttttgttcgttggataggattccaagcgatacactttcgaggcagttctttgcgctgagctaacatgttgttttctagtttcagcctttcaggacaactatgcttgtaggatatatcatgggtcatggccgaccatcccttggcaagcttcacatttatgctggcctaaaaggaggctcttgtaaaattatttcacaacagtttaaaagttcaacgaaatgataatacagtttcaacaataagctcaaaacatccagtgatttttttaatgtataataaggaatgcaagaaaaacattataataggttgacttggctagagaactatccatggtgtttactgatcggtggtgcatgtccatcatgcagactggcagtttccaacgagaagttcagttcatgcagccgttcaagagggcctttgttcctgctatcgtgggcggctactcctccccctgcaacctcggaggagacagcgggtgtgattcgagagaaccgggagcaaagtggagcgaggattagggcggcgggttagctggccggggcgaacggagaggaacaagattcgatccactgccctgcgccaccccctgtgttctcgctctagatctccccgctcccgagactcccggccaccgcccggccggctcacaccacgccactcgcggacacgctgctcctctcggctcccacctataaatacgcccctgctcatggcgctcccctctcagccacatgtgtcctcgatttggtagcttgcaagaaccctgctgcgaccccgtgttgcgttgattcctcctcctcctctctcgagatcctggcagggagtcgatccccggccgattgcgaaatcggtggttgaattgctcttcactgctctcggggtttgttgtctttgagcggttgctctggaatagtctgtttctgttcttgttccttctcatctctcccttgatgcatttctccttcttggactcgtagaggtatctgtccacatcgaccacaaaattgatcttgcggcctctctctagcttatgcggttctgaattctgcctgttcttcgttgatttgttctgtgcggtcactcttcagtcttcactgtcttgagttcatgaagctgggaactccaggcatatcagcccgcatttacttgttgaatccgtttctccttctgtgacgggagaagaagaaagaacccccggcagaactctcgtctcaattcgattggttagatgcaaagagatggtgc

SEQ ID NO: 53 - DNA, 1996 bp, Setaria italica
  source 1..1996: mol_type = genomic DNA
tggaaatgaaattgtagaatgatgtgaaataatagtatataaaaaacagaaaaaaaataggcccggagtacttgctttacgcatctgttagatgatcgatgaggcattcatgtcacgatctttagggatgagtgttcagtttggctattttaccttttatgaaatacaataatatatcacatacaaaccgctaatatttggaattctataaagtgagcaattttcaggtctgtcagacttgcatcaccactcaaagttcgtcaacctgtcaggcaaactcctgaagatttccaaatactctgccaaacatcattgcagcaggaatgcagtagaagaaacacattgtgcgtgatattattcgttcgcgtttggcaataatttttgcttgaagcattgcattggtcgaaatagatgtgccatcatgagtacgaaacctgaaattattctacctgaaactaactatgctaccagttcagatagaaattgtgacaacactcaacatgaagttccgctgcttgcatcgcatcggcattgtaggcattcaacattcgatggagcagagagaaatcaggagcagccgacattgttgccagctttgccatcaggagcagggagataacgcggcaatgctggtcgtgcgtgccaccccgtggacggcccttccttggtctactccagcacggtgcccttcgccgctgcctggtacgaaacaaggaggacaagaaggacctcgcgcaatgagtcgccattgcaggctaacgcggtgaatttgccccgtcgcatttccgacggggacggtgtacgctggatggatgacgacggcgccgaccgcgtccgctgcggcacggtatgactgatagaagtttgcatattgattattgattattaatcatgatccgcaggcaccgacgacggccgtgcacctcccgccgccatcctctagcgagtagagtggcaggcggagtctccagcagctcagatggatcttgcgatggtgtagatgccgctgccgccgccccagtgcacgtgcgagtgattggaaatgaagagacaaggagtaaaaggaaagaagataaggataattaagaaagatttgatatatttcaacaatatcattttacacattctccaatcatacctttatactatctatactactcatgcatactacctatactacaacttaaggttttagcagtatacaattaatctcaaccgtcggacccttacatatgagtcattttcgaatagtagtataaggtagtattgtgtaccgtaaaatacctctccaaatttcccaccagaagagcagcaggatgttcctcatcctttttaaatctgttatttctgtgtccaaaacccattcttgagtttattccaattgcattgtgccaaatatcatgttaatgtttttttaagtagcaaaagagggaggcatatcatgatatcaatatatcttaatgaggcatattgaataccaaagcatccacaaattgcagacctaaatcttgtgctaccaattccagttcattgatggagcatgatcgagtaatcttttcagctcagtttaggagaaagctaagcacaactccttgtatggtttaaaatagttacacttttttacttttcatggttttcctatattcaatatttaaaaacctcacaaaccacctctttgttgcagttcgtcaaaatggcaatgtttagtttctacaggatggtttcaattggcataattaaagatgctagagtctgagtgtctgaccatcgaaacgtcatgtggttgatttccaaatgaccagatcacacaaattttagacagtggagtgcaagtctacaacactccaatctccaaactcacaccctttgtgcctcattccgtttcagttattctcgcagcgcaccttgaagcttccctaacgcatgactccgttctctcccaggcctccctaaaaccatgccaagaactcccgaaaaggctttctagttcacagaa

SEQ ID NO: 54 - DNA, 1005 bp, Setaria italica
  source 1..1005: mol_type = genomic DNA
actagatctacacggtgacatcctggagaaagagacactgaccgtcggtcttgagtgaagtagtcgtcgaggacgccattggggatccttctcggatttggccgttggactaaatctggaaagagatcaatcctaacaaatctaaatcggattacagtacgcgtgccacagtatacgggtagatttggataacttcatgtcctcagcccgcatgtcctgaacgagcgggcctacttatcagatccgtatcggtgggaacctatgggatacccatatccctcatgcccccagcaatgtacaggtgcatctgaacttgaggttaccattcatgaacgtgcactctcgggctggcagtacggtattcacgaaacaaacccgtataagcccgcgatcaagcccaccagcccaatcccaacagtttcactttcaggcccaaacaagattctgcctcaaatttaggcccttcaactataataagccttattttttaaaaaaaaactaaaggaacatcttggaccttgcgttgacttacgattactgaaatggtctctgacgacctagcaaaatacaagaaacgaccaattttctgaaacagcgatacggatcaaatgaaaggcaaaaggaagggaaaatgataaactatagtcaaattatattgggtcaccagcacattaacatctgtacggctcgaggttacagtgtcctagctagaaagacggcctcactgaaacaagcgtgcattcatgctattctgttaggcagtatacatccatctcctcaactgtatacattaatcagtgaactaactcaacaattgcaagagcatacgttcatcttatatacttccttcctccgttttaaaatttttctacacatatatagatgtacaataatatctatgaacctaaaagagtcaaaacgacctacaatttagaacgaagggagtattatcccaacagccggagatgcatgcgcaagccaatcagcagagctgctcaatccgca

SEQ ID NO: 55 - DNA, 2256 bp, Setaria italica
  source 1..2256: mol_type = genomic DNA
tgttggtgccttgcgcgaatagaagcaagcggcgagctcggaacgtaatgcgacgagcttgcaaggagcagcatcttctaccactgcaagggatgcaagtctggattgttttggatcgacccaaaaactcattaaaacaaactaatcttgatttcaaagaagggagagtggggataaaaatgaactaattaaccagccagcctactactgcatacctactagtgtcaccacttggatgttggaactagcaactgtgctgtgtgttgtggatgcgaccgttgcacagcactagctgacccggtgaaagtaaaaatcctgtggagaatggctccaagcagccagcggaggccgacgcttgtccacgtctctctcaaccggaaaataaggggggaaagatcctgagaactggaggccagtgtgagctgcttcggcttagccgcttactacacgttgccaaaaggccagcgcggatggccacaactccaaatcctcgcccagctccgcctcacgctcccgccatcctgttcacaacacgacggcctcacaatttctttttctttttcttttttgcaggagctctgctatgctatgtaaagaggaaaagcaattcaaaatcttacaaagtcgatattgcataaatattagagctcacactactcaagttagaagctaaactcatgggtttggacgcctcacaaatttgggaggcgactggtgagtaacccacccaccaatcgcgagggcaccctctcatcaaaacaacgttggtgtttcttttttttttttactaaatggcaggagctctaccttattaataagaaaagattaaaagagtttaaagatcacaagcaaacggcacgccgctgcaaccgcccaagagtgcttcggcagacacatgtcgagtgttataaaaagagctatgtgatctaagttagggaacaaaacgttcgtctatattgctctatgcattcctttgttcgttttgccacctgatgggccgttagaagcttgttttcaaaaattctcctgttaccctctttccacatattccacaaaatgtagatggacatttcgttgaaatcttactgctgatttttgtggatatatacttttccaccgcctcccaccaatctctgacgttgtcgaaatttgaggggtgtgcttgctaaggaagcccacaaatatctctcatatagaaacttggttctagaccgcttgagcatatgggcggagtaggaagaggtgttgcccggattccattggcccattgcataatgcgcaagaggttttggtgcggccatcctctaagtgcgaggttgcctgtcgtgagaattttagtttggatgacaatccagacgaacagcttacatttattttcagtgcgggcacgccaaatgagattggctttgtgacatctatgtgacccaaaaaactgagcaccatatgctgattgggtggagtatttgccatcagccgtccacttccaagtattcgtatcctccgcctctaggtatgtcctgcaatctgatccgagtgagacaaactcctcaacttgagttgtagtcgtattttgttatgcaaggatttgatccacgtgctgttccatagctcttgtgccattgtcttgttttttcttctcaccagatcatataaatgtggccctaaattccttggtgcctcgccatcaagccaaactatggtgccaacacctcgccttctttccgttcgacgtccaacaatggtgccaaaaacaacgttggcgtttcacgtccaactggtagtggcagcacggactctgccgaaatagaacaccgaatatccatcaacattgctttcagggtctcgttgcaacacctgaggcctccaagcacctccagcccagcagcactagtcttctgctctctgtaacaaaaaaaaaaaaaaataccagcaccacgccgcgaaaggtcaccccgagaatcaaccgacgaaacgagaggggaggaagaaaggtcacaagtcacaactcacaaacagaaggggtcgggggcatgcacggagaaaaggccacgcatcgatgagcgtaacagtgaaggttgtgggtgacgcggccagccatcggcaaccatacgttgggctatccaaaatctcatccctcaaccaatcccgacctcacgatcccgcgccgcgcccccgcgcaccacaaacgcggccaccccaatccgccaactcgtatatacacgccgcttgttggctagcatcgtcaccttgatcgat

SEQ ID NO: 56 - DNA, 2058 bp, Setaria italica
  source 1..2058: mol_type = genomic DNA
ctgagaaatacatgatggaactttcgtaccaaatgtagttggttaaaactcctactgggatcagggttggtctgggctcagttcgaccagctctcacccacaattaaaaatgctaagctcagacttatggggcaataatggattgacggaaatccagatccagcggccgatcgatgtgtcttaatttgtagctagttctctggttactatttttcactttgcttcagtttccccatttaaattctttttaacttttgatccggccaagatgatctgatcaaactttacctacctttggggtagtcaaagtttgatcttctttgcccgaatacaaatattgtagtgattagtgaactcatctccaaatgtgacaaattggtcctctttcctgatgtacaacgagcggtttattgctccagtttgcactagtacgctagtttccgtagtgctgcagtagagtaatcacggcaatgctttgtttaagttgtcattaattgtgctgcaattgattaaaccagtgtaaccaagtcacccctcgccatagtagtggcgtgattaagcaaccgacaagaagagaactaaagaagcctatcatcatctcgatcctagcgttccaggacaactctttcagcaaggcccagccatttttgctctcatactaacctatactatagacatctaagaggagaccggaagacatggcatctctgacttctctgttacaagttgcttaggtaaactagatgatctgcttctacttcaatttgcgcccttctctacagcaagtggatagatatgatgcttaaggcctaacaattcatttgctactaatacgacttgcatttagtgattagatcgtgttagctgtctctcgttatcccaatcacgacgagtcatgtgattatggaagtcaactacgtacgaaaacctcgaggtcatcgcgcctctgcagtgtcaaccacgagtagaaatgtccagtccgtcagtggatgtaatgcttgcttgtgtcgattgtaaaacgtgctgttcagagttgatccaccaggccgtcgtttactttgcttcacagctagtatcgtataagcgcttgatcactaataataacaactccgatcccggcgtttaattacggcaatcgatgttgatggatcttttggttgtcgtgctgctagctgttcacgtttcagagatcagtttagtcaaatgcaatgcataggtaaggcatccacagtcatttgctgaaggtctaatctgcatactcatttggtaagcatgcacttagcaattaagtatttattatgaaatggtctatccataaaatttctaccatttttcaagttccaataaaggagcataatccaacaatgttacaatgtcatatataatatttgctcggctgctacttgaaatggcatgtgtaataggtgtttgagcttgtaagctaactgctgccccttccgttgcaaaacatatacatatatatagttctcaaatataattgtcctatatgcacacataagagaaccaatttaataagtgaaatttgagcaataattatggaattgtgctatggagctcattattagacacaaaagttcaacattcaagtaattcacaccagtaaattaaaagcagtgaaaacgtattgagaaccttaatatttcgatggatggttcttccttcattactttttaaaatgatgaatataaaactaatacattgataaaactgcttaaatcagagaaatcaagtaggtcagtttcaagggggccttctagacacctatgatcatattacctttgatgccctagattctccaatgatccatgaagatgccttcaaagcagctaaaattaatcaaagcaccagataggataggaaaacaagtacagagacaatttgttattacatcgcttcttgcatatagtgtagccaagtcaaggtgctccactgatccattggcttttaaaaatctccacttgatcttctactgaaccactagctactgcatggcctcatcaaggtactataaatagacatgctgctttcactcaaact

SEQ ID NO: 57 - DNA, 349 bp, Setaria italica
  source 1..349: mol_type = genomic DNA
aacacaaagagccagtcatcctggtcaggtcgttttaggatcagaaataaagtgcgggaaggaaaaagaaaaagaaaactctagccctactcccattttgtggtaggcaagctacaattttgttcccttgttcagaacaggggtgtgcattcaattccttgcttcctcccattcccccatcccatctcctctcccctgctccgccgaagcagcaagccagcctggttcccccaacacccacagccatcacctcctccccccaatccggcaatcccccactatgaatctgatcccccaagaagcccccgcttccaatctctcctaaactgccccgcacatccctgccagc

SEQ ID NO: 58 - DNA, 1681 bp, Setaria italica
  source 1..1681: mol_type = genomic DNA
ggatgatggattgcttttgagaatgacttcttaaagcgtcaagcttttctgactgtgtcaggtcagcttcaggttgaaacttatgcttgtgctctcagtagtgtatatacctttggaccaacgttccgggcagagaactcacatacatcaagacatctggcagagttttggatggttgaaccagaaaatgcatttgcaaacttgcaggtgagctgcttcttgatgactaactttattactttgtggttcgccacctatcaaattggatcatggggttttgtgtggacataactaatgttaaacttgtataaattgtgtcacaggatgatatgaactgtgcagaaaaatatgtacaatacctctgccagtggttactcgatcattgtgaagaagacatagatttcattagcaaaaaatacgagagaaacagtagacataatcaaactgcaattgaccgtctgaagcttgtttcctcaacgcattttgaacgtatttcatacacaatggctgtggacattctgaaaaatacagaacaaggttgaatggggaatcgatttagcatctgagcatgaaaggtatgtgcaagttgtcagttgatcttactggtcttcacctgatttaccttctttgattggttaactgtaactacgtattctgtgaaggtatttgactgaggtgatatataagaagccagttattgtttataactatcccaaagaaataaaagcattttatatgaggctcaatgatgatcagaagactgtttctgctatggatgttcttgcgccacaggtatagatcgaattgttgaaatgtctatgatgctgtccattgttcactgaagtgccccacaccattctaccctcaatcagcatggatataagcagccagattcatgtctgctcttagtagaatataactatttctttctgccttttagaatttagatatctctggattcttttttcgccttttcaccaattacaaagaactaaaactgcatataactatattaagataacaatatttacattttctgaaatagctgtatgcttgcaactacatgctggatattttgctttgcctgctttgtatatagtttgaaagtgagctttgtggccgatgatttctacctaaccataaattattttccttggtaggttggtgaattgactggtggaagccagaggagcatctagatgtcctgaaacagaggtaccgacttgctcaatataattttgtttctatcaggatcaatattaggtttcatttgctcgtcggtggaggtagcaagcagttttgtccatcattggttcacgaatatttgctgaacattgtccaatatttgttctacagaattttggatgcgggattgcccatcacccctgatgcgagctagtctgcttcatggcgaggcggtgacctcgacgtgcagggtgccagggtagagtgcccatcacccctgacgcgagctagtctgcttacgcaagcagcgacgtcacaagtgtagtaaaaggcctcgttgacccacgaccaatccaccgcttcctctagcaccttcttccccgagcaccggcaggcagcagcgagatctaggcagcagccatcgctcctcttctcccccctgctcctgtataaatagcagcaggcaggggcaaccaattccatcaactcgtatcat

SEQ ID NO: 59 - DNA, 428 bp, Setaria italica
  source 1..428: mol_type = genomic DNA
caggatttaggtttcatttgctcgtcggtggaggtagcaagcagttttgtccatcattggttcacgaatatttgctgaacattgtccaatatttgttctacagaattttggatgcgggattgcccatcacccctgatgcgagctagtctgcttcatggcgaggcggtgacctcgacgtgcagggtgccagggtagagtgcccatcacccctgacgcgagctagtctgcttacgcaagcagcgacgtcacaagtgtagtaaaaggcctcgttgacccacgaccaatccaccgcttcctctagcaccttcttccccgagcaccggcaggcagcagcgagatctaggcagcagccatcgctcctcttctcccccctgctcctgtataaatagcagcaggcaggggcaaccaattccatcaactcgtatcat

SEQ ID NO: 60 - DNA, 1280 bp, Setaria italica
  source 1..1280: mol_type = genomic DNA
tccaccgatcatcacacacagccagtagtgggggtgggccaagcaatcaggcacccggcaatgcgagctgatgcgtgatgatggtgctaccaacaaactgactataaaatttctgatttgaaagggattggcctcgatattttattagctccccggcttttgtcacgacacgttagcatgcgtgccttctagaagctagtccgggtattaccgctagaaagttcccgaaatgaagcatttaccacccgtaaagctcatttttctttatgatgagtagacacggtaccaacattgaggaccgattggttggctcccaaaatctgccctgccaaactagggcaagttcataaattttgacattcgcttggttggcaatcaattaaatcctattctaaaattcttgcctaggttttgatataacatgccctatattttggtctactcaaattttggtatggtaaattttgaacaccaacaaatcaggctattatttatcttatctctttctcaatttcattacacagcaaggcagtaattaaaaggaccgtatatacaatggatgtaagaataaaatgtataagtagaaatatattggcatgcctcgtgctggtgcatgtcgatatgctctcaattagaagttggagacaggttatgcttaggatagtcccaacctatgatatctgtgtgtctatactgccacataagtaagacatcactttagaaattacattctacaacctataatttcttagtgtggatccttaattaattcatcatctctcctctcaattcctcatcaattatgaagacaccatcttcttccaatgcaaatttaacactgtctaggatctaggttcaggtgttgatactgggtcttgcatgagatccagtttcttgttcttccaattctctctcatttaatatataatcacataagcaaaagatcctatgtagctgcacaattaatgctatggaaactatcctaatcggagggttgggactgctcctgcctatggcggcttattccccatttgcctaacctgaaaatcgaaagggagtgcatgacagggcaaacactagtgttgcctgcatcaataatcgtccatgattatatagaggtagcatgacttttttaggcgtcgtgtcctaatcaatcagaaaagaaagccaacctaatcgctatgggccgcaaccaccgatgcgactatgcgagtatatggaacccgttgctactcccccactatatatcgtggagtctgatggcaatccaacggcagacg

SEQ ID NO: 61 - DNA, 275 bp, Setaria italica
  source 1..275: mol_type = genomic DNA
cctgcctatggcggcttattccccatttgcctaacctgaaaatcgaaagggagtgcatgacagggcaaacactagtgttgcctgcatcaataatcgtccatgattatatagaggtagcatgacttttttaggcgtcgtgtcctaatcaatcagaaaagaaagccaacctaatcgctatgggccgcaaccaccgatgcgactatgcgagtatatggaacccgttgctactcccccactatatatcgtggagtctgatggcaatccaacggcagacg

SEQ ID NO: 62 - DNA, 655 bp, Setaria italica
  source 1..655: mol_type = genomic DNA
tcgatgtggcatgaattttagtccggactaaagatccaaacaccccttaatttcttgggttttggatattcctcaacttgaaccatcatagattacatagtccaagcttcttcctcaaatttttgtttttgtccataattttaagctagcgaactcattaaccaactacccctagcttacgaaagttgggatgacacaaaaacatggtggaaatccttaggaatgaataaaggacattttttggtccgtgcaaaagtgtgacttgtacttgaaggaaaattattggacctaaaaatagtttaaaaaaatgtgacactagctcgagagaagcaagcgaccaatagggattgtccaaccagatagggtgatactatagagtctatagagacgaagcgaaagcagatataggctggtggaatggaaagggatgttaatcctgccgagggtgtaactaatggaaaatttcttgtatttttcgtaatccatgctttggattacacagcaggccaaaacgagtgacaacacgtcactaatagttgttgatggttgcccatttaagtaaaaaaggttacagatcaccaaaccaaatatcaccgcaaaataattggccctataaataggctgcccggcctgcataacaatcgtgccttgctgt

SEQ ID NO: 63 - DNA, 1758 bp, Setaria italica
  source 1..1758: mol_type = genomic DNA
ccgctgctcaaaacaagtcaacgttgtggaggttctacaagattgagaggagtactaggcatacgttttctccggtcaactgcctgtggagtcaccgtgcttgttgaagatccgcagcgataataataaaattttgtgctattgggtttaaaagactatcggtcaggatatactctctttacgttatgacattgactatgatattcactaaagttgtcgcatgtgtgtaatttgatcctaacgcacatgtaatttatgcatgtggttttacctttaaaactgggtgtaacattttaacactattttaatatatttaacacagtaggggcctcctctactgtatttaccttaaaaaaaagataacaaaaaacgcatgcattgagtaagcagaaatgctaaaatggcgtgaagaagaggtatagtctcacaaatctttgtccaaatggactaatggtctaaaaaaaagtgaaaatgaaccttagatttcctggagaattaacaaaaaagaaactttgatgccaataacgattttcctccgggagagactatgcagggcacttgctgctccgtttctttcaacaatgaattccgttgggaaccgtttcatgcaagttgcgcatttctttgaggttgtggctgacatagagtttagggtactaaataatcattggtttggccaatagattaaaaataataattcaactgtgctagaaactagagttaatacctttttcattgcttgcatgagaaaccctatccaattttgtacagtactgacgtccgcgttaggatggaactggtgtaagattgacttttattaatcggaactctatacaattcactgttttttgtgcaagaatttgaatacaactggtacaagcaatgtatgcaatcttaagctgtgcgatgatgtatccagtttaagcaatgagttggcatcacgatctgaaagaaagattcaaacagataaggttttcatcaaattcagtgcatattgtgcaagaaatttgaatccaactctttcaaggaacttaatcaattcaaagatgtgcaatagggaaccacttcacacaatgaactggcatcacagcctgaaagaaaggtttgaacagataaggatttgataaaattcaatgcatgttgtacaaaaagaatctgaattcaattcttgcaagaaacgtattcaacttaaatatgtgcaatgatgcatgtatttaagcaaggtatcacatcacagtctgcaagcaagaatttaaaaagctaaggatttcaccaaactttatgcaaactgtgcaggaagtcatattcgattcgttcaagaaacatcacaatcagaaaagcaagatttgaaccggccagcagggaacttatccgctgcgtaccatttatacaactttattcagattcaaatgaaaaaattgcaacttttgtaagtatataagcatctctgctataaaaaatatgttaagttactgttaataaagtcaaattgaccgggcaaacaattggatttcttttaattcatgcaagcttttccagtagcaacataacctttatcttgctcttgagaaagaaaaaacacatgtaaaaactggcaacgttggagtactggtattttcctgcactatttcagccaagtggccaaccaatagcgtcacggcatgtaaatgcctcagacgccatgcagttgtttgattgcctctcaaccactataaattgggggcacatatgccctctcctcggcaattgctctgtgct

SEQ ID NO: 64 - DNA, 1866 bp, Setaria italica
  source 1..1866: mol_type = genomic DNA
actatggcgggcgtggtgagacccccgcacgtggtgtttcttcaaggcgatgagagtgaggtggagtccaacggcggatgtggcgaggtccccgcgcattgtgttatcgcggtggcgactgcgaggcagcctaagagaggtccggattcggtggtatcactctgtcagatagagtgtggtgttgcagcggcactacagcggagggtctcgtatggcggtggccatctcggtgcagtgcagtctgtttctatcggttccctgtcgatgccggaccacgcctagacgtttcggcgagttatgagcgtggatgttggtgggtgccgccgtggcgagcagagcggtgagaccgtgttgatgtcccaatccaatcggtagggtgtgatagttttggtgttgagtggctatctgcattgatgtcctaatccgaccaggcgagtttgtattgtttttcttttcttttccttttatattttttcagtctgaaattctttttttaatataatcggcagctctccaatatggttcgttcaaaaaaaagaatttttaagaaaagatagataaaaagataaaccaaattctgaattgtgattcagataccctcgaaatggaagttggcctgtccacttaaaattgaacgcatgattccgtcaataattcagtgccgtcctcctgtttactctttaattcttattacgtgacatcggcccgttgataagccgtgctccttgtcgctaattcttattacgtgctgatagaggcgagtcaatcaaacgttgcactttgtaacccttaatctttgctaagagtcacatgaccccgtacatctcgatcgatcctcttttagttggcgcgcgggttttaccatgtgaagcaatgtgccggcatgctgctgtcgcaactagctcttcatcaagctatcgacagatgagatgcgctcccattggaaccgaaatgggtggaaattctgttcgattctgtcgtgccgaccgtgcgaaagtgaaaccacccttcccctcgccgcaggcatgtagtccgcgtggattttgaacaccacagctgacatatgcctccatgtccattcctgccgtgggaatctctgcacctggtctgcctagtcctacaggctgcggccgcaccatctaaatgcatgtttgaatatcagtagttaaattttatcacatgtcacatcggatattcggatgctaattagtaggactaaacatagctaattataaaattaattgcagaacttcggggctaattcatgagaccaatttattgaggctaattaatctatcattagcaaatggttactgtagcaccatattgtcaaatcatggactaattagccttaatagatttatctcacaaattagactccatctgtgtaattagttttataattagattatatttaatacttctaattagtatccaaatatccgatgtgactgtgaagtttaacacatgtgagccaaacacccccgaccacccggtcgccgcgccgcgccgcgccgttggatgccgcctcgccacgccatgcgacgcaacgccctgcactgcatttcgtggccttgcgtaggggcaccggaagagccgctggttcgtttcgttcgtcccctggccgcgtcagctgatttgcgagcagggtcgaatcgatcgcgcgcggtcgccgcatcccaccaagccggagcccttcggggcccctctaaaagcaagtcaggctcgcgaagtgaccgaaaagatacattactaccagctgcagcgctgctgttggccctgccctcgtcaagatctgacttttgaatcgcataattagcagcttgtttattaagcttaaacgattgatcctactccttgccgaca

SEQ ID NO: 65 - DNA, 382 bp, Setaria italica
  source 1..382: mol_type = genomic DNA
ccgaccacccggtcgccgcgccgcgccgcgccgttggatgccgcctcgccacgccatgcgacgcaacgccctgcactgcatttcgtggccttgcgtaggggcaccggaagagccgctggttcgtttcgttcgtcccctggccgcgtcagctgatttgcgagcagggtcgaatcgatcgcgcgcggtcgccgcatcccaccaagccggagcccttcggggcccctctaaaagcaagtcaggctcgcgaagtgaccgaaaagatacattactaccagctgcagcgctgctgttggccctgccctcgtcaagatctgacttttgaatcgcataattagcagcttgtttattaagcttaaacgattgatcctactccttgccgaca

SEQ ID NO: 66 - DNA, 1061 bp, Setaria italica
  source 1..1061: mol_type = genomic DNA
cattcttaatagagcatgggctcgcttccatcaacgtcactcaagtgaattcaaggagcaacttcatatccactttgaattcccggtatgtattgaatttgcacatctcatgtcacttccttgaacccaacaaatatttcataacttcttttaccgtatatatagtgtttgagatagaatctgaagaataatttatgcggatactacgtatatgagtttatccatggctttgtaggttccaagcgtataactgaccatgaattcagagtacatatacaaatttcttaacaataaattagttctaattgttcagatccattgatctaatataataacctttgctaatgacatagattatgcacatgaaagaggaactcctcgagatagaaaaaatcagggcaattcaataacaactcagtggaattcttttagatgaggtagtaaatccagtaggagagttccataatgatggatcaaatatacatcaccgtcaggactcgggtccagaatagttgatctaaaatgttgaacttggagagttgatgcaacgtaatattattcatataagtgtatgcacaatatgtctatgtataatattatcttaattgtaatattatagatcaaatacaacttcatatattgcgtattcgtaagaaaaaaatacaaaatactaatatagaataaagaaacagaaaagaaaagaaaagaaaagaaatataaaagaaaaaaagaatttagtatcggttggtctccccagccagtactaaaggaacccttttgtactgacttagcaatactggttgcacaatcggtactaaaggggggtttggacctagtactgaaggcgcttcctcagcagtggctcacctctccattagtgttggggagcccactctatcgctttatcgtctctcttccatgtaagcaaaatgatacttggccggcctcctatgagccagctgagttgttattgattgaggacgcctcacagatgctttccagtagcaggccgataggcattatttaaacccttcgtaggcactaacccagcaatagcatca

SEQ ID NO: 67 - DNA, 980 bp, Setaria italica
  source 1..980: mol_type = genomic DNA
aactccatgccgtggtgcctccacacgcgcagcctccgttgtgcctccttgcgtgcagcctccgcgctgttgcacctagctcgtgtgtggaccgctgcacctcctcgccgctatagcaccctccgctgagagcaagggccaacactgccctcgtgcaaccgccagctgctactcccgtagcccactgcccgagcagactcggccccgtgctcgctggatccggtcgcaactcatcgctgcatcgcgtgcgcccgcagcagatccgggcgagctcacagcagactcgggcaggcccatcttattgggccctgttgcggccatcctagctgccacacagggttccggcggcggcacggcagggttgagggaggaaagggtggcggccctcgggttgcgcggtccgccaatgccgcctctgagaaggagcgatgtggggttgtggatgccgtggccgctttagtgtacaactagttgcatccttatgctactacttttgtagattgctgttgtttacagctccgtaaatgctttatttctgtgttttcctctcatgattgtttttttaactattattgtatctctgacatttccctttcagtatattattttttcgtatatgcatagctgggagcctgggacatgtgcggaggtgcagcaagtactacctccgtccataaatctataacattttcattttttaagtcctaaacatgcaagtcagtacaagtgcgagtctacaccgcaaatacagatactgtttccctttcccaaaattgttttaatgtaggcgaccacacaacttgccctccacaacttgccatccacacatgccccatatgcgtgcacctaaattactgattactgagatacgcactcaatcacctgatcaaatataatcaagtgtagctcgatcgctaagccaggccgatgcactctatttaaacctatagcaaggaacttatagcgaagcaaacacatct

SEQ ID NO: 68 - DNA, 668 bp, Setaria italica
  source 1..668: mol_type = genomic DNA
agagagctagccatcgtttcgttcctggtggtggacaacattcggcagggttgagggaggaaagggtggcggccctcgggctgtgcggtccgccaatgctgcctctgagaaggagcgatgtggggctgatgtggggctgtggatgcagtggccgctttagtgtacaactatagttgcatccttatgctactacttttgtagattgctgttgtttacagctctgtaaatgctttatttctgtgatttcctctcatgattgtttttttaactattattgtatctcttacatttccctttcagtgtattattttttcatatatgcatagctgggagcctaggacatgtgcggaggtgcagcaagtactacctccgtccataaatctataacattttcattttttaagtcctaaatatgcaagtcagtacaagtgcgagtctacaccgcaaatacagataccgtttccctttcccaaaattgttttaatgtaggcgaccacacaacttgccctccacaacttgccatccacacatgctccatagattactgattactgagatacgcactcaatcacctgatcaaatataatcaagtgtagctcgatcgctaagccaggccgatgcactctatttaaacctagcaaggaacttatagcgaagcaaacacatct

SEQ ID NO: 69 - DNA, 2249 bp, Setaria italica
  source 1..2249: mol_type = genomic DNA
gagatcagtggaaagctttgctttccaataccttggtaaaaattgctgtgtcgcggtgccaggagtttaccttctcgatctcatttacattccacatttcatattgcactttacattccgtgtttacctttcctagaattcttgcatgtgtaatttataggattggaacctagagtgcaaaactcttttgtagtagaaatagcaacacataaaaaactagtgcacatctagatagaaattgaaatacgtttttataggtgcatggagccttaatttttataacaccaaattcaccccctgatagagtgtcacagtcccttcaccgtcaacacggatcgattttgtgatggctgtcgtgttaggttgatcgtaagtacaatcattttcccattttgaacattcaaatcttcccaccaatttttaagtccgtgtttacctttcctacaattcttgcatgtgtaatttataggattggaacctagagtgcaaaactcttttatagtagaaatagcaacacataaaaaactagtgcacatctagatagaaattgaaatacgtttttataggtgcatggagccttaatttttataacaccaaattcaccccctgatagagtgtcacagtcccttcaccatcaacacggatcgattttgtgatggctgtcgtgttaggttgatcgtaagtacaatcattttcccattttgaacattcaaatcttcccaccaatttttaagtatttacctataatttctcttctatggcagcttcctgtagtggatgatttacctcttgcttgacgaagaaggtggttgggctgatggccatggcataaagggacccaacaaactcggcaccagtgatgatggcctgtagctggggagtaggaatataccctattattcccgaagagtctgagtgagaatccttgtggtagtagattgggtcaacaatgatttgcttttatgttcatacaaattttcagagagatcttttgctaaatctaattccatttggttgaagattactctttactttttatttatttaaattatttatgaaattagaccgaaacacatttcattttgtgttatgttccttgggattcatgtcagtctttggttttcatttcaaaatacacagatttcttccgaaatttgatgagaaaattctacagataattaaaaaatcgacgactacacaatttgtattagtgattggaatatcgtatgaacaaacatagtgacacaaagtgaatatgacttgtatgaatcaggcccacggagcataaatatctgcatatttgtctaactatccggttgctgtgacattgtgagctttttgaatttgccaactgatttgcgtaataagcttcttttaaagttatatgacgatttgcatattatctctagacaaattggaaggaaataaaggcttaaattatctgataatataattctatattttctcatgtcttcttgagaacgtagtacgcgaaaccaaataatagcaatatccaagatcctcatccgttgtcgtatcgctttactatttgtttgatgagcaggaatggatgagatcctggccgaactctgacagatagccgagaactgtcacattggcatgtcacggcatctgtacgtttgatatagggggcaggacttgcatgttgctttctcgagttacacgttatgagctatacatgttgctttctcgagttacacgttatgagctatagcctataactgaaatcgatcaataattacataattctgttgctcttttcttggctagttcactaatgcgatgggacatgaaatctgaaggtgaaatggatgacaccggtggacaaccagttgcgacgatatagtagctcgccagatatggaaaagtgaaaattcgacagattttattatagttaattcaacacgtgctcctgaggatgttgatccctgctacagagagctagctagactgaactagctacctagctcgaaaacataactagtcattgaaataacgacaaatgtttggttaaagtttgattaaataattttcatagactaaaaagctgttgtcatgcaaaaaattaccttgttctcaataattttttagcatggcctcttttatttgcaattgagcttgtatgtttttcacctagaaaattactgaacatggttattatacagttctaaggtaactctgaaccataagtctataaatagagctgtagcgtacatgtttttctatat

SEQ ID NO: 70 - DNA, 1687 bp, Setaria italica
  source 1..1687: mol_type = genomic DNA
agcaaccattgtacactacgggaaatataatatgcataatggttgctctcccaccttcatgaggacagcctattggatgactcgcatcgggtgccatcaaagaacccatcaactactatattcatggactggaaggaaatgaggcaatcatctagctactacgtttttgggtgccttgatacaaagcgccttcatgctattatataggcacttaccataagtaccagtaaacaattaactcatacatctcgtagccaatgaactatgaatcagcagaaaatcattattttgtttgatcaactaaagcgcacgacctgtgacgtttggcacctagcccaagcattacaccgatatgtgatttaggtaatactcccacagtacattatgcataaccaacaccttaaattttgtacaatcagacttttcgtgatttgatcactatttgtataaacttatgtcactatcatgaaaacacctcagagatgcacattttcttggtacctgctcccattctactataacacctctccgtcccatccaagcagttggcctcttatttctttttggtgtatgtttctcagcctcgttcatggtgtctacctccatgcgaaacacgggttcagataagtgtgcaggtgcagtatctatgaaataaaggcagcaagttctcccagttcacaagagaaaatatcgtttataattatggtaataaaataatgtaggtctcaggacaaacaaccatatgtactcgcacatacaaatgtgattgcttcttgtaatcccaaattagtaatcgtcagtgcatgacttaaattagtaaacaattaactcatactccctccatcccacaaagagttattttaaaaaatttcagacagtatagtagtggtgagaaatgtatatgttgcccctaataactaatactagttgtcattaaaaatcatgcggtgtgtttagtttctcgatcctaaataaatgcacgcattgaaatcagagaaataacaccaattgattatttgattggctctacatacttctccatacttttttattattggtgtgagtgttgttttagttagatgagatttattaggaggtaaaggacactcttcgtgggacaaattgtagaatctaaaaggacactctttgcgggatgtagggagtatatctcatagacaatgaactatatgaatcagcagtaaccattgtttgatcaactaaagcatgacctatcatataaggctaatttaaattctgatcaatcagacatttcatgatttgactatttgtatttctaattctggagagtggatataagaaactatgtcactattatgaaaacaccctgagagatgcacattttctagatacctactcccactctactatgacacctctccatgccctccaagcagctggcctctaatttctcctggatgtaaggtttcttagcctcattcgtggtgtctctgtccacgcgaaacatgcgtgtgcagatacatgtacagatgcactatcgctttcctgacatagagtcctgatccgtccatagaaccatctctgtcctcgtggtccacgggaggatagctaaggccttattaattaacggtagcttactgatagtagctaagaaacacactatataataaccttcgtcaagaatgcagaacccatctaagcaaagcgc

SEQ ID NO: 71 - DNA, 2315 bp, Setaria italica
  source 1..2315: mol_type = genomic DNA
atccacacaagtactgaacgaaggttgcagagcgccagtcatctcgcttgacatgccccccagttcgctggtatcaggtttctcaacacccgatgatagaggagtactagtagcgtgctagtcagctgtgactcgaggtcagcgctggacagagttcgtatgctcgtaataatttacgctgtagatgtagtggactacagttttcgtgcgctgatcagcctagcgtgacctcgccggagttcacccgtggcgcaccattggctcgccgtccttttccgatcgagcaccaaatctccgcacgcttacacaggccgatcggatcgggacggcccgccgctagctggtcggtatagtagaaccgcccgacgacgtcgccggaaaccagtggacaggacacacacatacagcgcacgccgccgcatatttttatcggcccgtggcaagaatgtaaaccgccacccttgtccggcgctgccagcactgacacaggggatgcatcggggatgaccggggcccgtgacggcgacgcgagccgcccggctcttcacagccacaagggcgcaggtggcagcgccggattggtcggccgccgctcctcgtgtagtcgcgtgtactcgaggccagcgatctggaggccgccgttgagccaggtgtcgcctccgcaggatgcgtatgggcgtggaatgcgtacgtatgttgcgtaggaaaaaaaaggaggttcttcttcttcttacacagcagaggacgaaagactgattcggttcggtactgtgacctttgtggaaatggcggtcagggcaggcgaacgttccgtaaccctccgcttcgttgtcatgcttgtcttcgtcagggggagtgacctgggctggtctcttagctcatcatccggtaaagcgcggactcacagccaatgctaaggacaaacggacaataccgacccttcaattaggtcatgtggatgagtcattgggggaagggatcaggcaatgagaagagaacaaaatcacacaactcgatcagcaggacaactcacacgaacaaattaaagcaaaagccctgatcatgcaaagtactctaatcccaatgatcatctacaagtcttgtggagagttcgtggtcccagaagggtacaggattaggttaggggcgggcgattacatgacgcttgggaacgacagaggacatggcaagctgggctagaaacctctggagttttctttcagaaagaggggcgatgcatggaggaggacagctaatgccgtcgcgctcatccagcttgtagctaggttgcaactaatcgtgccccgcgataagaatctctatttgtacgtagacagggctcgctgcctggctgtgcgtgatgcatgcgacgcaatgattcgctgtccctgttgttcattattggctatcaagtttctgagcatctccattggcggataagtactactccaaattttctttttccagaagataacgctgccgaactgtttagttagtatatccacaccgtattctttgtcatgagctgaataaatgtccatgccaaatgtgtgcctcattttccaactggcaattggcagttggatatgtagcaagcaagggcatgctgacttcagtttagaaacttctggtgacgagtattctttttttggtttaaagaaacaagaagccctgattagttgcttgaagacgatgacagccatgctgacagcgcatgcgaagcagtgcaatagcacagggaatgcatgcactctggcaatattctgggttgcttgtttctagctacctgcaaataagtgttcgctactgcttcacgctccatgatgactcgtaacctcatgcatccaccctagctaattcttctgtcaacttcctagccacaccttagggtggtaatgtaccgccacgaaattaagctggaccactgattacaagcaccagtgtggttttgtgctttcagacgtcaggctagctcttaattcgcttaatttttttttcagaacgtatagtacgtaagcacagaacctatagaatataagctgaatagcccctccgattgatcactggccaccagtttggcttcggcgtgacataatggtgagggcttagtcggttgtgggcggcaaaaattataacccaaaaccctgtaaccagaaatggaacccttatccctcactaataatgtaatcaatcagtagtcgctaagcaagccatcattgaggcgatgagctcgccctctcccctgcacgagccgtcgacctcccgcgccccatatatacctcgcctctcccgtcccctcacacaccactctagct

SEQ ID NO: 72 - DNA, 2156 bp, Setaria italica
  source 1..2156: mol_type = genomic DNA
ctccaaacctttatttgaccagctgtttttttttcacatttccctgcaactattacattcggctattcattaacgcatacagcgtatgtttcacattaacatgtgcagaaacgctggggaccacggggtggaagttcaatgcctgggctgctgtaatttgcttactagcctatcttttgaactagcctggaactatacttcgatcacacaagcagtgcatgggatgttattcaccagcccattttttgttagattttggctggttactgatatcctttgctgtcttgcacctgttctgaagtgctgttatccgttgctcattaaattgaaaatgtggaaactcattggacgcaagtttgcaatttgtatactgtgtgtccgagagctgctctgttggcacgcaattcttttaacatctattttttttcccttactggctggtttcttcttggatgggaaactgtagacgttgggcagcgtgcgatgctgcaatactcatcaggatccggttgtctgtatgcatatgcacaaccaaattctctccttgtgtgatcaaaatgagctgaagaagagaatctgttgtgcggcattgacgaagagctcagtcagttgcagaaatccatcaaaccaaccggcgtgattaggacccgagccgtccagatcatttcaaccatgaaggcttataaattatgctgagtgccagcgtcatttcgtgattgctctatccttgtttcctttcgcttatagtaatctgatggtcgtagtgcacccaggtgtcgacctggcacgagcttttcatgactagagaatagagatgtgtgcctctcgttacaggtgagctctgaacaggatagcaaaagtaaaacgagtgaagctccagcttcaattcctgtgatggaatctcgtggaagatttgggacgagatcattgggcgctccctccccctttctgtctcgtgctgttgctgtcttcatccacgaaaagcgtctccagctgctctgttcaccacagcagcatgacaacggcagccactgatgagccctgcagacggttctaggcttctagctccgcggttggaggctcatttcactccgtgatctgaactcgcgctgcgtgcagtttcttgacaaaacttgctgtgacctgatgaaaagcaaggggaaaaggctctccaaatacagtgctcgttgcaacttgccccagacggccagacttgcggtttggatgattcaggaaagagccacgatataatgacctcatgacagggcgtaatacgctgtgctgcaacaaatttgtaccacgccgttttggtttcaaagaaatgagggatacagccaacgctggcgcacgatacgacatttaggttgcacctaatcaggcacctgataacgatcttaattagcagccagcaagtggttctcggatgtgcctctacgtggtgcttgcctgtccacgctatcattggcaagccaaattgctgattgagtagctctccattggtggagaggggcactccgttgccaggcaaccgatattattttaattaaaaaatcgattttttttgcaggcgcattgtgattatccagtaacaaagtacagcctccatccagcagttggaaacagagggatctagaaactccttggttccgagaaagagaattcgcatggccgttaagcacagaattcgctggtctgtgcggcaagcatagcaactgcatgcatagccacggttcacctcatcgttcaggcgttcacaccgtgcatcatcgttcaccagcccattctcagaagcagacagaaacacacgcatcacaattcacatcgctaatcgtcgctgaatgaagcttagccactgattaaaattagccagcctccccgtattaggcagagccaccggttgggctctagaattatctaacgatgatgagcgctttagtcggtcgcggtcggcaaaattataacccagaagcctccacagccagacgctccgctccgggggggcttatccctgacgaagaaaatcactaaacaatccaatcatgaagaagcagccgcctgttcctgtcacgaaccaccaccgtctctgcttctcactctcactcccggccccttaaatacctcgcctcgcctcggctgcctcgtcacagagctagcta

SEQ ID NO: 73 - DNA, 1393 bp, Setaria italica
  source 1..1393: mol_type = genomic DNA
gcgcagagtcacggcgtactagtcagctgccgagaggatggatgggatcatcgatcatgccaggatcgtcgtcgtttccttgacagtttttgaccttttgcgtcatgccgccccgagtcgtcaccattgcttgtgtctccttacgtggaaaattccatgaaccggccgaatagctttgtcgcaactgagctgaaaaaggagactgaaaatgatacaagtacttgatgtttggtgcgagatagacatcaccttttgaacggatcaattagtagtttgcagcgcaaacagacgattgaaaatgcaagcctgccagctgcactgatgggaaaagggcatcctaattcctgttcaaataaagggcatgattagcgggatactactacccatcatcttgtgcaaatttcttgagatgcttgtactgtttctgactgccgttggcgtctgacagcgagatgctgtgtgctgcagcagcaactctacggtgatattttccgtcgccatgcagtttttttcccgtgtggtaacaaaatacaagatttcctgtcgtcgccatacacttcaaaggtctagaaattaataaagcgaactctattttggaatgtttcgatgggactataacgattttctgaacgtctccagtactgatggttctaactgtcaaaattaaacttgtcgctttatcaatgtcttgactgccggtaactgacagatagtaacctatgcaagctttagtcaagaaacggagataagcacaactcagccacttgcacatcgcaatcactcggatcagttatagacctttctcacaggatttcaaccccagacaaattttgcatggctggcatggttgcattgcaggctaacaaccacgtgttgagtggagaaattgatgagatgccttcaggcttccttattctgaatattacatgtttttgtgctcttgtatctccttacctaatcgaacagaaaaggtgcagcaggagagccaaattctggtttgcgccaacaagaaagagagagagccagaatttgacaggcatgcttgattattctatattaaatcttatctggcatgcttgacaggaccagcaaatgttaaaaagatatgaaccgtacattgaagattgtgatgtctctaaaacatacagtatatgtcctccctagcctgcaagcactcgttcgtttaccattataatttggagactcgaaccatcttcatatgatgcatgacaaactaaccactcattactgatcgccaacaaacatgcatgcagctcacaccgctagcaaacagcaagacatgttaccaacagactgtcacgggcgcaaaaatgatcaaacgtgcaggctactatatatacgcaatatgcaatgcatgatattcaggccatcg

SEQ ID NO: 74 - DNA, 2722 bp, Setaria italica
  source 1..2722: mol_type = genomic DNA
ccatctctccttgaaagagaactatgtttaagtttcaacaagagacaacaatgcccttgtgaactgacaaaagagataacaggaaaagacaaggattcgaggaagcaagaaggcaagtgagcagtgaattgcagtactaccgaacaagactgatttttagtacagtacctaattattttggaataatgaataagagaggataatgttggacgaataaaaattgtgaacggaaaataactagatatgttttgggaggcactaacaagactttaatttggaagagagatacaaacatataaacatgttagtggatagataatatggtgtcttatgttagaaaagtacattattttttatggttattttcatagatctggaacattaatacaaaactaatcctatggatacaaaactgcatgaaaagtaatcatgaatttattctaatattgggcatcatatttaagtcacgttgcagaatttgaacttaaaactcgattcgtacgtggagaaacaaaaaagatcaaatctcattagaggtatattggaccatttaaagtagtttgggggaataaatcgagcctaagttttatttaggggttaagaggacagataaagtagattggtgatggtagtaaaatggacattttcctagttgtatctggtatgtactatttggcttaacatatattaagtcccaagtagtgcaaattgggattcaaatactaaattctctttacgtagagatgaggaaggagaattacaaagcagcattgccacagccttgcttcagttttgctcgatgcaagcagggtggagtggtggacaggcatggactagcggcacggaagacaacatcatgcatgtgcttccagagttgccaacggcaaaagagcagcaatgtgtgtagttcggccatgggctcggtcacaggtgggttcgtctcccagaacaggcaggagagggggtagctggctgagcatccatccgtgatgagcctaaaccgttgcgcaaacgggcagctggagagataatgcgaatatgtgatcctccacggcgttgccacagatgtcacggatcatgcatgcatgtcgtcatttagcagatgtttgagtctgatacacccttcacaccaagcaaattataaccaagataaggattcgaggaagcagaaggaggcaagtgagcagtgacaagtacgtccacaacacaatccagacgaaaacgaacacatcaatgccctcggcgccaatcgtagtaatgctgcaacaaacaaagtcctgtgaagacggtctctattaaatagccacacatggagccgatatataatccgaaagataatgtaataatagagaagcgtcatgttttttcaaaaataaaaataaaaataaactgggaacaagcccatcgcaaggccgggagcgagcttgcttttcagagtcagtgagccaccgggcgggagctgacgggtaggggaagaggaagacaacatcgtgcatgtgcttcaagagttgccaacggcaaaggagcagcagtgtgtgtagttcggctatgggctcagtcacaggtgggtttcgtctcccagaaccagcaggagagggggtttgtggctggctgtgcatccatccgtgatgagcctaaaccgttgcgcaaatggacacctggagcgataatgtgaatatgtgatcctccacggcgttgccacaaatgtcactgatcatccatgttgtcctatagcacatgcttgagtccaagtccctccacaccaagcaaattatagccaagacaaggattcaaggaagcaagaaggcgagtgagcagtgacaaagtatgtccacagcacaatccgtacgaaaacgagcgcatcagtgccctcagcgccaatcgtagtgtttccgcatcaaataagtcctgtgaagccggtctctattaaattgccacgtatgaagccgatgtgtggtccgaaagataatatgcaataatagagaagcgttatgttttccctgaaaaaaacctgggaacaagcctgtcgcaaggccgggagcctcgcttccgtcttgctttttcacagtcagtgagccaccgggcgggagctgacgggtaggggaagaggaagacagcaccgtgcatgtgcttccagagttgccaacggcaaatgagcagcagtgtgtgtagttcggccatgggctcggtcacaggtgggtttcgtctcccagaaccagcaggagagggggtatgtggctggctgtgcatccatccgtgatgagcctaaaccgttgcgcaaacggacacctagagcgataatgtatatgtgatcctccacggcgttgccacaaatgtcactgatcatgcatgttgtcctatatagcacatgcttgagtccaagtccctccacaccaagcaaattaattatagccaagagaaggattcgaggaagaagaaggcgattgagcagtgacaagtacgtcgacagcacaacccagacgaaaaccaggcaacgagcacatcgctccgcagcgctgcccctcggccctccccttgcattcgtgattcgccgccggtcacatgccctccgcttgaaaaaaaaaaaagccccctttccatccgccatgaggcgtgcaatcccgtgcacacactcgccgactccccatccgttattttgttttttttagaagccccatccgttatttaaacccacccgcgcgcctcgctcgacctcgtgcca

SEQ ID NO: 75 - DNA, 1882 bp, Setaria italica
  source 1..1882: mol_type = genomic DNA
cacggaagacaacatcatgcatgtgcttccagagttgccaacggcaaaagagcagcaatgtgtgtagttcggccatgggctcggtcacaggtgggttcgtctcccagaacaggcaggagagggggtagctggctgagcatccatccgtgatgagcctaaaccgttgcgcaaacgggcagctggagagataatgcgaatatgtgatcctccacggcgttgccacagatgtcacggatcatgcatgcatgtcgtcatttagcagatgtttgagtctgatacacccttcacaccaagcaaattataaccaagataaggattcgaggaagcagaaggaggcaagtgagcagtgacaagtacgtccacaacacaatccagacgaaaacgaacacatcaatgccctcggcgccaatcgtagtaatgctgcaacaaacaaagtcctgtgaagacggtctctattaaatagccacacatggagccgatatataatccgaaagataatgtaataatagagaagcgtcatgttttttcaaaaataaaaataaaaataaactgggaacaagcccatcgcaaggccgggagcgagcttgcttttcagagtcagtgagccaccgggcgggagctgacgggtaggggaagaggaagacaacatcgtgcatgtgcttcaagagttgccaacggcaaaggagcagcagtgtgtgtagttcggctatgggctcagtcacaggtgggtttcgtctcccagaaccagcaggagagggggtttgtggctggctgtgcatccatccgtgatgagcctaaaccgttgcgcaaatggacacctggagcgataatgtgaatatgtgatcctccacggcgttgccacaaatgtcactgatcatccatgttgtcctatagcacatgcttgagtccaagtccctccacaccaagcaaattatagccaagacaaggattcaaggaagcaagaaggcgagtgagcagtgacaaagtatgtccacagcacaatccgtacgaaaacgagcgcatcagtgccctcagcgccaatcgtagtgtttccgcatcaaataagtcctgtgaagccggtctctattaaattgccacgtatgaagccgatgtgtggtccgaaagataatatgcaataatagagaagcgttatgttttccctgaaaaaaacctgggaacaagcctgtcgcaaggccgggagcctcgcttccgtcttgctttttcacagtcagtgagccaccgggcgggagctgacgggtaggggaagaggaagacagcaccgtgcatgtgcttccagagttgccaacggcaaatgagcagcagtgtgtgtagttcggccatgggctcggtcacaggtgggtttcgtctcccagaaccagcaggagagggggtatgtggctggctgtgcatccatccgtgatgagcctaaaccgttgcgcaaacggacacctagagcgataatgtatatgtgatcctccacggcgttgccacaaatgtcactgatcatgcatgttgtcctatatagcacatgcttgagtccaagtccctccacaccaagcaaattaattatagccaagagaaggattcgaggaagaagaaggcgattgagcagtgacaagtacgtcgacagcacaacccagacgaaaaccaggcaacgagcacatcgctccgcagcgctgcccctcggccctccccttgcattcgtgattcgccgccggtcacatgccctccgcttgaaaaaaaaaaaagccccctttccatccgccatgaggcgtgcaatcccgtgcacacactcgccgactccccatccgttattttgttttttttagaagccccatccgttatttaaacccacccgcgcgcctcgctcgacctcgtgcca

SEQ ID NO: 76 - DNA, 1757 bp, Setaria italica
  source 1..1757: mol_type = genomic DNA
aactgctactagcagcacaagcattctttatttttattaacaataatttctacaacatgtcattacaaatattttattcgcgagatgcgagggcacgccaaggcccggagtctcgaggaggacgacatcgtgagatgaatgcatatgtctccttgtgttgcaaggtcacgaatggaagtatacttgctagggctcatcttgttcttcgacgagtggacgaggactcgaggagtccagctgcggactgcttcggcagacggacaccacgaaggacgtaccctccttccaaccactggtctgttttatccaagatctgagatcaagacgaaacataactatggttgcagcttcaattctttgcaaccgctgagtgcaaaacattttatgctgatgtaataatttctatgagaaacgataattacgatgcttatgtgtgagcttgccatatgtgcaattaatgctttattttttaagaaaataatatcttttctatggcaattttatccccacaatattagcccgtagcaatgcacaggcactatccctgtacgtatataaacgactatagctaattgaaatggcggagtatgccttggacccaccttactgctagttgaatcggcgaaattttccttctctaagcagcacatcttaaaaaaatataggaactgtttggctgcacagcactgcagctacagctgctgctgccagcgttttagcctactgtagcggttgcagcaaggctgcatgctagcagcccgaaagtagcacagctaaacaggcccaaaactttttcatatgaattttagatccgaacattgtgtcgattatttgagtatcaagatggttccaaataaaaaaatatgaactacaaagttgtacaatgtttatataaagtttatatttgtctaagttcatatgaaaaagttatatattttttttaaaaaatgtgctgctcagagaaagagaattccaccgattcaactggcggtaaggtcataaattccgttgtttcggttagatagccaattcaaatgtctatatgagtatagatttgcaaacttttattagaacatatatttttacaaaacattaaaaatactttttacaaaacatatagatttgcaaacttttattagctggctgctgcagctgcagccagccgaaagcagcacagccgaacatgcccataactttttcatatgaatcttaatctgaacattgtgttgattatttgaatactaagatagtttcaaataaaaaagtatgaactaccaagttgtacaatatttatataaagtttatctctttttgtgtttgcattcgtatgaaaaagttatatttttttgaaaaaaatgtgctgctcaaagaactggcggtaaggtcataaattccgctgtttcggttggatagccaattcaaatgtctatatgagtacagatttgcaaatttttattagaacatatatttttgcaagacattaaaaataaaagacatataaaaacaaaacataatcaactttccttgaagccacaccactcgccgcagccgcgctctcaaatttcctggagccagaagcgtcggggtccggagccagacgggcggcagacgcggccgggaaggtggggccccacagggataaggtgcgatgggggcgcgtgtgaaccccgtcgcgccacctgacggtgcgccacaggtacggtactgtatattccaacctgccgttcgtctcccatttcccgcgaactcacttgcct

SEQ ID NO: 77 - DNA, 1681 bp, Setaria italica
  source 1..1681: mol_type = genomic DNA
taatgcatatggttagacttcatagcatgcgttatgtaattatggtgattagatctagtatgtcaacccttcatgatatataaacacgttcacctatgttcgtgcccgtaaactacctacaccgataggggggtcgtgacaaggtctgtttccgtgtagggtgggggttttcgggaggttgaccggaggtagtagtttaaagattgctttggatgagatgcatgatgtgtttgctcgttggctagaactacaactagaagatatagccaattacaactagaagatgataggctcttgctatccttggtggtcttataccatatatatctgtggatgtgatatacccttattcatgatatcaatctttataacaagtttgccttcatatacaatcaatgcatcatgttaggattgcaccgttagattagatggaagatcctagttagttcgctgccgatccacggattgataaacattagacgaatactctaagggaaaagctatgatgatccgtgcatttgcggttcacaaattgacgcgctaactgccgtcaacaaacttcaacaagtaacagtgggaaacaaatgcggtagaagtgaagcaggaagaagatcgaggctttctagcaagagttttctttgggagtgagtggagagcattgcatcgttctaggtttgtttgtggaaaagtgcatggaaatgtatcaaacctgcaggatttgaattgacacttgttcagtagtcaaaggtggtcccaactatcttgtaatatgtctcgtgattcaacatttgaaaacaagatatgtaactggatatttctccaaccattcaaaacaagcctcaccaaatagaactctggtagataacttgtctcacaaggcttaaggtaccaacaatggttcaaaattaaatgtgacagataagtcgtccgatacgagcatttttgtagcagtgatggatcctatgtaagtctacgatgaacctatatagtagcttgatatgctagctttggtatttacctctttaaacatgttcatgtaatgaacagtctattttattagctagactcgaaataaatctcgacaataacttgtaggaataatatcttatggtgttttgtactaaaagcactgactactaattaataatccaagcatcctaatttgttaaggaaagtccaaaatgttacatgtattctttatgaatgtagcacaaagtattctttatgaatgtagcacaaaggataagacatgtatgggtgagtcaaggccacctcggcaacaaacaatacagaaggtagacttttaaaaatggccacccaagcttatgtggctttgacgagccaaacttatcatgccagcctcatccatatcaagataggaacaaaaaaaaccatgtcttctgatgtaatacctccatttttatttatatgtcattttggttaccaccaccgacgtcaaacaaacaaaaatggaggtaataacaaaatcaattaaaacaaaaaggccatgtcttctgatgtagcaaaatgaattttataacttcagctggtatccaaatcgacaaatgacatgtcatgtccagattatgaggcatcctccaaaattcagttttgcaaaggccaaaatcctacatgcatggcttggctcctataaataccaccccaatcaatctctaaccca

SEQ ID NO: 78 - DNA, 1681 bp, Setaria italica
  source 1..1681: mol_type = genomic DNA
catgcaccgtaaagttgatgatgaacacttcttaggcagtctttcaggggagagaagaacttcaactagccactgcaaaataactataacattcaattgaggggcttggtagcacttgaaatgggtctctttcaaccctcacttcactatcttgatatattcccttgtcgaggcgagatcgatgccttcacaatctttctactgctcattaaaaacttgggagctcgccaagcaactcctagctagccatctaggaggattaaccactgctctcaacccgtgatcgcacttgctttcagaatgccaacaggtagtgtcgtaggaagatgtatccgagcattagctaccaacagaaaaagatgatggaatactcagaatcttcaaaaaagtcattgtaacatgaaatcaaagtttagttttgcatttataaaattatagcctatcaacttctaacaccaatcggatgcaaacctaagtgtaggacgaaatcggaatatactgccttcaacccaaatccccaattccagaggctcaagtctttgccacagccaataggagtgtgccagcgagtcccttgcactgtacgccattgcagatatacctattgctctagactgcaatgggaaagtggaccacacttattagaactgtaatctcaaaaagctaccttgttcaaaaatcataatctgcattatgtctcaatggtagtgctgactcgtcagaatcaagaggtcacaggttcgacccctgcttctaaacactcttacctttttttattttcctccctttcttatcacagactaacttgtgggaccctgctagattttacaatgaattggaacactttatttctcaactcatgcttgcatgggggatcccccttggtttatgactttttgcacaccttatttttcaacaaatgcttacatgtggaatcctggttggtttatgacgttttcatggaccttatattgtcacaaaaccaccatgtaacaacgagtgacgatttctttttggctacagtggcaactttatgacgttccgtaactttgtcactaaatttgctcggatgtgaaactttatgacgtttttagccagaaacatcatagaactatgacgagaacaaatgtgtcataaaattttcgtcatagatcaacacatttcttgtagtgtaatcaactgtctatcttagctaaactcaaaataaatcttgacaataactattgtatgaatcatatcttgtggtattttataaaaaaactatgaatattaattaataatctaagcatcataatgtgttaagaaaaatccaaaatgatacatgtttgctttatgaatgtagcacaaagtattaaggacaagacaagtatgggtgagtcaaggccacctaagcaactaacaatacaaaaagcatacttaaaaaaaaggccacccaagctgatgtggctttgacgagccaaactaatcatgacaccctcatccatatcaagatagaaacaaaaaggccatgtcttctgatgtagcaaaatgagttttataacttcggctggtatccaaatcgacaaatgacatgtcatgtccagattatgaggcatcctccaacattcagttttgcaaaggccaaaatcctacatgcatggcttggctactataaataccaccccaatcaatctctaaccca

SEQ ID NO: 79 - DNA, 654 bp, Setaria italica
  source 1..654: mol_type = genomic DNA
gggactgcccttattcatccaccggctggttgttagatttgttttccccttttccttcaaccggcttgtcaacttgcggtgttaataagctggttcccctttcagacgtgaggcgtttgtctatgccatgcaaattcagacaaaaccaagtcaaccataattttgttttttcatgttctttaattctgagatgcagtgtacaagcatccagctagctgccctgtcagttgatcacgaaattaaagcgtacgtcccacctaatgcctttcaataacccagctgcagcgaactgaactgatcggtttcccttgttttgacttcagtcccctagcaatctgctcgatcatgcacgctccatttgcatcatccaggcagggtcgtttcagctccaaacccggcccctaaattagtacctgcccggtttaacgaactaatacaaaaatgctaaacaacatcgctcatcagtcgtcaacgacaatcatcttagcgcttagctgtactcaatcatcagccacgttccgcgcccggtcgcctccccgatcgacatgccgaccagctgcccagataaacaaacgttcagaagccgcccgtccggaagccctagcacgctataaaaagccctgagcaggaacgccacctcactcacacactctc

SEQ ID NO: 80 - DNA, 500 bp, Setaria italica
  source 1..500: mol_type = genomic DNA
ttccttttccttcctgcctttggccgatgtccctttgcctttacatccatgcacagataataaatctactgcacacaaaagaagatgctgatagaataacttggccactggggaacaagggtatttggtaggtacctcttcgaagcccatacatactctactggtcgctgcagcagacggtgtggtggccagaataacagctacctaggcccgtcgcgtgtctacacctgcatctatctgctcagctcaacgaattatattgccacgccccaccggcgatcaaaagctgcaaaaggcaaagaagcttcaaggagatggccagtgacaccaccctgtatatcagactgcttgtcccacaaaatatttgtttgtcccaagaataagctcacatgttgctcaaggcagctggatagctacgcaagaaacccttgggcaggctacgccccctctttccctggcttatataaaccctgccctacgtcccatcagcatcattgcag

SEQ ID NO: 81 - DNA, 1544 bp, Setaria italica
  source 1..1544: mol_type = genomic DNA
ttgggaacgctcaaagcaaggatctccgaacgctatgttgggcttgggtgggctcgggccctaagctaggagcctaaaacgcacaaccccaaactacatttgccaggcacacagaccagcccaatatctttgaggctgatcacatttcttagcatccctccaatcacaaataactgatttattaaaaaaatcacagtgtagtcaatgcatcaatatctctttaaatatttcaaattggattttagaaatattattttggcatatttttgcatgtgtttcatactagtaatcaattgtcaaattaatgcttcatacttgttatttgtgaaggaaaggaaaagttcttgtttgttatgcattttccctatctcttttttggataatgaataatatttcgactaactgtggatatacttcatgtacaccattaagttaaaagcagagatgcttgcacaaacgcacacaaaatctattcctatgagcatgcacctcggagagaatgagctggccaatcttacgttgttgtcgatgacatgttgcctagaataaatttagaaaaaaatattagcatccataccgagtcaaggacttaaatacaggtgagcaagcttcaccataaggaacctaaccagctgagctgttgagtccgttgttgatgttggctccatctaaatacatttgcttgttattcgatcaaacattagcaacttttagctacaagattatatgccatgagattagtgtgctcctcgaaccaatgctctcctgatcatgagagatatttaaagggaccatacataacacataggttaagattgtacaaagatggatattgattgatgcataaaaggcttcattatcaaatcatttgccgtccaaaactgaattcgattactatcattcaattgaaagggacctcacattactaaataactttataaaaaaaactctgcttttgaatgtctaaattttttgttcatagccctccattaaactccacttagctttaaatttcttcatcaaaattgttgcttttggcgctagagaaaaaaaaaatactttgcctttaccaacgtggccttgagactagcgtcttctgcatcatacaccgtcgacgtgtgtcggtcggctgtcacgacaaaagcaaaactccactgcccctgcaaaatgaacatgttgggagattatttaagcctgagccttttaggtgacaaagccaagctaatgcgcaggtgcgagcattatacaagcgcgccgcgaccctttgcctagtgctgtccgttctgtacgtgtacctgagctggtcagctccacatgcacaagtgtataggttgtacttaccctgcctaaagcttaatggaggaggtgagatcagagctggaaagaccagccatattaccggctccctcgcccaatcctcataactaatcagtttagaaattagcttaccagatcatgcttatcattccatttaattcatgcttggttacgttcgtcctataaatacgtgttcgtcttctcatctcgtcagatcagcacgaagc

SEQ ID NO: 82 - DNA, 1908 bp, Setaria italica
  source 1..1908: mol_type = genomic DNA
cctacctactaaaactttggccctttcttctcagaaatgttggtaagagtaaattaccagagtagaccgggaaaggggaggaggagaacataagacagctatgaatcaggagcctagtcaaatgagcaggtaaccttgtccatgtcacttttttttttggtctcctccagggttcagcagttgcttgggatgctaaaagtttgtgacctcttttgaggcatgtaacatgctatcagtatagttgctagggatataaaattttactcctctaccatatgcaagaagccacgaacctatctgctctttgcaatgcattcatgacaaactacagatgtgcatgcatgcctctgaagtcttctgacagtaactaccctaaaaaaaatcttctgacagtaactgccctaaaaaaaagtatgctgacagtaacaaagcacgctgttgttttgttccttgaaggaaccggccactgatacgtgctgcacggaagaaccaagctttctcccgacctgtttgagtttggaagctttcaaacaaacaacatccaagctaagtccttccaggaacctgctgctgctctcgtgacaagaatgtaggccatgcgagcacctaacacacggatcatcacgcgccgtgtggctcagagttggtacaccacatcatatcgcctggattggtctgtgtacttgtgtcccctgggaaaatcagtcacttatttttagacccctggattgaacacagaataatgcaatgcaaccatgttaagcatgttgtgcacagccgtttgacaagccattccccatctttcatgtagtgatcctcacctagctaatgtaacacggcaaaactaccctaatttggcagtagaactctgatgtatggaaccatgacgaataaatggaaaatcttagacgctactcactactcatcttgaatcccagaagcttgtgtacctttcattatcatttccacaaagacagggatactgatacgtgttcaatgatgaccgaaccattaaaaaccaaagaaaccaggggcatagtctgcatatggtcgtcattaatatagtaaattaagttcaaactgtaacaacccttgtgtataacaaaagaagctggactaactatgaagcaaaaccatgcttttcgccgaggctcctctgaactttggttgcttggtttcacatagtgttaaactgttaataagcgaggttatatagttcgggtgaatatattactactgggacgaactgatatctaccactaatctactgtaaagctgcctaattttgctgtagctagatttcccggaagggggctcttgtatgctgcagaggacatattcaactgatcaatttatagacagaaagttgcatattctatcattgtgcctagcccctagctatatgatcagcataatcagcaatccatcatatcttcttctcagtgtttttttttttgctgggcgaaacaatattctttatttcagttcaatcctgtttaagcagcacttgctgtttctgcagtaacctgtaaccgtactgtacctactgctgacttgtcgcttctgagtggaaaaatgtctcacctgatcagaaacgatttcttcgcctacaattatttgggactagaagctcaatgctgtccatgcaaatttcggttaaaactgaagcatcaacagtcaaaatgtcagctaaaactgaggcatcaacagtcatacttgcagccagatggaagaacaaccgtagcagttggacacaatgtggagtcgacctagctcgctcgtttgctcaccctcttattctataagcatcaccctaacaaatccctaaccaccttcccttcgttacacacatgctagctgcctccctccagctataaatagcacccaaagcccatctcatctggccat

SEQ ID NO: 83 - DNA, 3354 bp, Setaria italica
  source 1..3354: mol_type = genomic DNA
acgcaaatgacaaataatggttacaccaaaataggttaacgcaaatgacaaataatggttacacaaaactgcagtctaatctgtttatgaaatctatcatatacctgtagcttgaaagcaactgctagcacgagcaaacatctcgaatgacaaataatggtttctccactcatctgcaaataagaaaatcgctcaggcaaaatctcttaaaagtgcgaaaaatgtggagttgaacaaaataaatcactaccgacacattattctgaggggcaaaacgcagatccgggccacaaagcaaccggattagaagctgacaagcttggaggctgtgttgactcaacgagcttggagattggcagatccggtgaaggtggctgcagatctgtgcagggagttgtcaatgcacaagtactatcattctaaactaggattagcttctactgctcacctttttacaagcagtcaaagtcagcatgcggtggcaccagcggaaggatcgggcttgtaacgacagtttctgatgttaatcgcgtgcttcagagattgagtaaagtgctgttaattttccagaagcctaggaaaaaacacatctggaccctaccttaagcaacaacacgtcatgcttcacagaatagcagcattataatcctgtcaaacaataccacttttgcaatatgtcaaacaaaacacatggataaactgaaatgaagtcatccctttgaagccaagggtagtctcccgatagtcaacaaagtattcttcgacgaccatcacatacacacatacaactagcagcatcataatcataacagtgatctgaacggaattgttagacgatttacatttcctcgctatagatttattcaaaataaggccaaacatcttctatggatgttctaatcataactaatgtaacatcaagagaaaaaaggtaatgctttgaccaaattggtgaaatatggtaatataacacattataattatgaacctaatcaaagtgttctgggccacataaaataaattaaaagatatttgccaacgaatataatgccttcttttttaatcaatgcttgcttacaaattacaagcatatccctgtgaggggcacacaaaatctggccaccacatccgggtttggtagaagaaacatcatatcagaataacatatacattaaacagctctccgatcagttgcgtaataacatatcagaataacatcatatctagatatagtatatgtctagatgcataataatatctataaatttagaaaagctaaaacgacctacaatttggaatggagggagtagttgttttctttatttagagttcgatcggttacgtaatagtttcctttaattattcatggcagcttccactgacttactaagaaatcatagacaaattattttcagctgatgcatgacaaaaaataaataatgcttgcctacctactaaaactttggccctttcttctcagaaatgttggtaagagtaaattaccagagtagaccgggaaaggggaggaggagaacataagacagctatgaatcaggagcctagtcaaatgagcaggtaaccttgtccatgtcacttttttttttggtctcctccagggttcagcagttgcttgggatgctaaaagtttgtgacctcttttgaggcatgtaacatgctatcagtatagttgctagggatataaaattttactcctctaccatatgcaagaagccacgaacctatctgctctttgcaatgcattcatgacaaactacagatgtgcatgcatgcctctgaagtcttctgacagtaactaccctaaaaaaaatcttctgacagtaactgccctaaaaaaaagtatgctgacagtaacaaagcacgctgttgttttgttccttgaaggaaccggccactgatacgtgctgcacggaagaaccaagctttctcccgacctgtttgagtttggaagctttcaaacaaacaacatccaagctaagtccttccaggaacctgctgctgctctcgtgacaagaatgtaggccatgcgagcacctaacacacggatcatcacgcgccgtgtggctcagagttggtacaccacatcatatcgcctggattggtctgtgtacttgtgtcccctgggaaaatcagtcacttatttttagacccctggattgaacacagaataatgcaatgcaaccatgttaagcatgttgtgcacagccgtttgacaagccattccccatctttcatgtagtgatcctcacctagctaatgtaacacggcaaaactaccctaatttggcagtagaactctgatgtatggaaccatgacgaataaatggaaaatcttagacgctactcactactcatcttgaatcccagaagcttgtgtacctttcattatcatttccacaaagacagggatactgatacgtgttcaatgatgaccgaaccattaaaaaccaaagaaaccaggggcatagtctgcatatggtcgtcattaatatagtaaattaagttcaaactgtaacaacccttgtgtataacaaaagaagctggactaactatgaagcaaaaccatgcttttcgccgaggctcctctgaactttggttgcttggtttcacatagtgttaaactgttaataagcgaggttatatagttcgggtgaatatattactactgggacgaactgatatctaccactaatctactgtaaagctgcctaattttgctgtagctagatttcccggaagggggctcttgtatgctgcagaggacatattcaactgatcaatttatagacagaaagttgcatattctatcattgtgcctagcccctagctatatgatcagcataatcagcaatccatcatatcttcttctcagtgtttttttttttgctgggcgaaacaatattctttatttcagttcaatcctgtttaagcagcacttgctgtttctgcagtaacctgtaaccgtactgtacctactgctgacttgtcgcttctgagtggaaaaatgtctcacctgatcagaaacgatttcttcgcctacaattatttgggactagaagctcaatgctgtccatgcaaatttcggttaaaactgaagcatcaacagtcaaaatgtcagctaaaactgaggcatcaacagtcatacttgcagccagatggaagaacaaccgtagcagttggacacaatgtggagtcgacctagctcgctcgtttgctcaccctcttattctataagcatcaccctaacaaatccctaaccaccttcccttcgttacacacatgctagctgcctccctccagctataaatagcacccaaagcccatctcatctggccat

SEQ ID NO: 84 - DNA, 2599 bp, Setaria italica
  source 1..2599: mol_type = genomic DNA
gtatttaggtgcatgcctatctgtagctcgatggaaaatgcacactttacgagaagtactacttttccacgtgggagttagccatgagcgagcaccgtgactgatgaaaacatgggcccggttgggccttttcggcctcaattagcaacaaacttagacgaccggcaagggggaaaacggcccatatacaataacagaccttaatttcttctcctctcattttggcccgtcccatgttggtcggaggacatcatgcatgattcatcgcagagatcggacgacccacgaagcccatgatagacctcctccttccctcctctccatgttcttcacaaaaaagccccttctgcacctctcgtgttcatctctggaaagaagcccccgctccctccattgcccgacttcggcggcgctaccatgcaatgcaaccatggccaacccccctgaccgttgtgagcacgacaccccatctcttgcttgtccaaccaccctccaccactactgcggcgagcggcgccgcgtctccgtccgcccaagcgggcggtggcgcctggccgcagcatcagtagcaactagggttggagtgtgaatagaggagaagaggaagaataactctgcaattttggtcattgcaaggatctcaatgcacaagatgtggaacctcctagaagatggataggattttccgttgttggtgcactgacaagttgggtcatgctcataataggaaatgttggtcacacagccaacctgcaggtcggagggttgattcacatggttgcgtatcacgggcgtgatacgaatacccccggacggccggtgtacatgcaatctcgtaattgatgtactgtaccgaccggtagttcgaacacacatgtatatgtttgacctggctgaaaaaagattttcagttgcattcatgttccattatcggtcgattatacatgtagcgcgaaatatgtgtgtacgtgatacatgcatgcaatagcatagtagcagtagcaaaaatacgaaaaacatcattctggattccaagttttggtccttcatttttcgaaaataaaaggatttgcacatgcatggtctgccgagtttgtgtatgtccgactaaaggagtgctaaagtgtggcatatataggacgatttcaccggcatgcttatgcttatgctacggtgtgtaaaccgacgcagcagctagctagatttgtttactgctgaaacgacgccctgatgacagtgacagaaacgtggcaaagctaactgtaaccgaatatatagttcggtgcatatgcctgtgctgtgtatatcctagctagctcctatttcatttctagtatcctaatgggagccaatttcaagatccgttgacctagtatgtcgagagtgtttacagggatagagttacgccattgcgtgtattttaaaggataaatgtgcatacgtatatacgggcgtttgtatctttacactatgttttcaaagaaagaaaaaaaactaatacttatccctcctgctgcggcggcaatatcatatcaaaaccccccgtatgtttcaggaaaaatggatcgaataaaacatctggagtagaactgtagaatcaaacgcgcgtctctctttcaaaaaaaaaaaaaggaaatcaaacgcgtgtgccgcgcggcgatttttttaaacaagctcaacgcctagtggatgatgagagtagagacgtgcatgcatccgcaggtcagctgcttgagctgtacgtgcgcttgctgcgaccttcgcggccgcgcaccatgttccctccccctgttttaatgggagttgatcgacatcgcgtgcgtccatggcaacatgaacgcgtgcacgccgcgcgcgatgtcatccctgccgtcgtcgttgtagacccggccacccgggcatgtatgggaaatggaactatggattcgtacatacttctcaaaaatgcaaccgtaactttacagttcgatcttacccagtgaccaataatcaccatttgcgctctctttttcttatttcttatgactaccttgtatgctgaggataacgtaagaatttgattaagaatttgattgtgtgcggagctgtttaggctggaaacaatttctttttctaaacagtactctctccgttccaaattgtagatcattttaacttttctaagttcatagatattattatacacttagagatacactgtatctagatgcataataatatctatgaattacaaaaagctaaaataacctacaatttgagcggagcggagggagtattatctgcaaacacaaagtgcactgggtgtagaacttcccaccacttcatcaaagccccccggggcgagccaatcagacggcgccacaatcagagcgcgtgtgccgcgcgcgtcgcttaattaacaacaacgcgcgcgcaacttgatcggatatgatgaagcatcgccggtcagctgcttgagctgttacgtgggcttccttccggtggacctccgcgtccatggcaacatgcgccgccgaaaaccacggagacagtgtccctgtcacacttgtacccttccgcgagctataaattgcacccctaaccatgtcgcagagcacac

SEQ ID NO: 85 - DNA, 653 bp, Setaria italica
  source 1..653: mol_type = genomic DNA
ccactaatctactgtaaagctgcctaattttgctgtagctagatttcccggaagggggctcttgtatgctgcagaggacatattcaactgatcaatttatagacagaaagttgcatattctatcattgtgcctagcccctagctatatgatcagcataatcagcaatccatcatatcttcttctcagtgtttttttttttgctgggcgaaacaatattctttatttcagttcaatcctgtttaagcagcacttgctgtttctgcagtaacctgtaaccgtactgtacctactgctgacttgtcgcttctgagtggaaaaatgtctcacctgatcagaaacgatttcttcgcctacaattatttgggactagaagctcaatgctgtccatgcaaatttcggttaaaactgaagcatcaacagtcaaaatgtcagctaaaactgaggcatcaacagtcatacttgcagccagatggaagaacaaccgtagcagttggacacaatgtggagtcgacctagctcgctcgtttgctcaccctcttattctataagcatcaccctaacaaatccctaaccaccttcccttcgttacacacatgctagctgcctccctccagctataaatagcacccaaagcccatctcatctggccatc

SEQ ID NO: 86 - DNA, 1090 bp, Setaria italica
  source 1..1090: mol_type = genomic DNA
ccaaaatgtaggccgatggcaacatgtcagcaatactctctctagccctaaacgaaggacattcagaaaactcagacaaattattaaaattatttatttatcatatttaggctaattgacagtcgttgcaaattataatttaatagagtaacaatgacaaaaaaaattgggataaattttggatcacataataactttattttaggaacggagggaattctcctatgttccatatggttaatactttaatagattaaggtactacctcctttcttaaatacatgacaccattaatttttttcattcatttgactattcatttatatataaatatttatgctttatgctaatagataaatctctaaatcaaattcaaagtaatttaaggaaagacatagcggtactcattttattttacttaactaatttactaaatagatattgttgtcaaaatttaagaaaaaaaagttaacggcgtcataaattttgaaaaaggagagaatatgttttcagataacacgcatgcttaatttctaatctttatcctttgattggctgaaaaagatacgaacaatgaacgaaatataaaaatagccgaatacatcaccatgtagatcgagaccggaatatttggtttttcaccgtctaaaaaagacttataataaacaacggctataatatctctcatgagtcatgattgtatactagatagaccccatcgtgatatacaaattaaaaatagccgtatacatcaatggtgagaccggaacattttgttttccaccgtggaaaagaaagttgtacaagtaccccaacagccgctatatctgtcatgagtcatgactttatactagaccccaccatgataaccttgagcagcaaaatattcacaggatcaaggatcaacagcaacattatgcataccacaaatcttgtggcagagttgcactggcaccaagaaccgaatccatcccacggataagatatgccatgtggcgggcggccagtgggtggaatcgacggggggcgaccgccgcgccggctggggataatccgcgcccatgcaatttgaggccattacacctcaccc

SEQ ID NO: 87 - DNA, 1483 bp, Setaria italica
  source 1..1483: mol_type = genomic DNA
tgcgcaggggttgggccggaatgggagttgctcggctcatgagaggtttaagggtttctattgatttgagtaagatttgtaatttaaatttgaattggttttcaaaattggctgggatttgagatgtgggctgggatagggtacagaaatgggacttttaaaaggatcctcaagttaggaatatttgactgagatgagatgggaatcctatagggttttggttgctattaatactcaaatggaatttgaatattatttctaggttttgcgagaggaaggatttggaaatttctatttctaaaaggggttctaagggaaacaatcacgtgcaacacatatgctaatattttgtgcaagatttatttataaaaaggttttgaatattcgggaagaaggtatgtgtttagtctaagaaaaaatttaaaaagtacgtattttaaatgctctaaaacgtggacgttacattttatgttgtattcctgttgatgtacatctcacacgtatcaaccgcaattgtattgtacacgttacctcatcaaaaatttatgtgaggaaaccttcaagtgaaaattcataaagagaaaaagagtacaacattaaatcttcttagctatataatattctatatttgctattctttatatgaatagtaatcaatcttcaagctttatacataaacttcatgattcttgcaataaagatctgcatgatctaaataatcaagtggtatagcttcatgttaaaattcaataattaatcaagttgattccttctagatataatttaaaagactttagatctaaacatgattaaagatatgctcccctcctagcgacatcttttgaatgtgttcaaaatgtcttagtcacattcttcataaatgcataagatggaggaaccgcatctttcccgcaatcggccattgctgcgtgctgcatcaacctccatggatccttattgaaaactactctcccgtggcctcttccacgacgtgactctactctcccgtggcctcttcccgcagacgcagaggcctgcagccgtgttgaaacccggcggggaccgtaccactttggcttcgatgtcgccaattcctcgctgtcccgtgctccaggttcactagcagccgcgtgagaaaaactggcggggctcgccgcgccgagaaaaatctcgccacacagctcacgagtcacgacggacaccgagaggccgagaccgcagaggcaaggaaagccgcaagcggcgttggcgagaggcggccaagcggaagctagctgccagcgtggatcgccatcccgccccgtcgtccagaagataaggagcgccgctaggtgccgacacgtcgcgccggacgagataaggataggccagcctggccgggtgacgccaccggcgaacggtgtccactcctgccacatccggccatggagccgctggctatttatatacgccgccggtggagaggagcctctcaagcaagact

SEQ ID NO: 88 - DNA, 2062 bp, Setaria italica
  source 1..2062: mol_type = genomic DNA
tatcggcgaccgctaagagaagacatttaaaataagtagtcggcattgtgataaaaagagagcgcgattactgatgtgcaggttctcgattgttgatgaagtcgactagtcggagtcgattctgactagttattgattgtatggaacccgccctcgactagttttctagtcgagacgagtagtcgaagtagaccatcctcaactacttttctagttgagatgagtagtcgaagtagtcgtcggcgacttgattatttgcctcaatctgtgtgtgacttgatcgacgagccgtatgcagcagcttgcggtggaaaccgactcagtcttcgattggaacacggagcgcgtcaattctatgtcgacgtagatttgtctgcttggaactccaactcagtgacttgcttcttgttgagtagattgatcttgatgatgaggtccttcaagctcgcctgatgatctcgacgatcacctctacctgacgcgccaactgttggtgcttagacccagcaacctaccgagggggtacccgaggtagtgttttgtggtggggctcgtcgaagatcaggaacttgaaggtgaactcgaacacacgatttagacaagttcgggctgcttatgccgcataataccccatgtcatgtgtgttggttggattgtattgattgatcagatatttggagggggccctgcctcgccttatattgcccattgccggaggcagggctacaggtcggttgttgtacaagagtactagtcggttttgaccagcgagtcctactctaattgctacaagtagtttcctaatccttgactagtccttgtccgccacgtagaccacgacgtcttgcacctagtctctgtgtttgatacatcttggtgtacagtccgatattgtaggactatccaagcttcccagtaggcccatagatgtatggccgacaactggataatgtaactctgggtcagtactatccttatctatatagacacaaacaacgtactatagcagaagtttaagctcgtaacccaccaatatttggtggcatagaccacgtattgctgatatagtgctcgtaacccaccaatatttcgtggcatagagatctcttaggcaataaattagcagtacgaaacaatctatgtccacgtgttgctaatacaatgttctaaaccttacagcctactggacagttctctagccatgatacatgtgcatgtccgaacaaatatttatgggtacccgaaaggttaattttttgtagtatttatgagggggaggggggcgttgacgaaaaaaataacttagctaagcgtaattggcttaaaaacatacaatgttgttccagcatcaagcctacgtgatcatttcacaaaaccaactcaaaagataggtgtcatgttccttttagtgcaaaacttaaggacacctaccttgcaaaacttagctttgttacccagaatgaaccgctaagctcgaggagctctgaacttacatgaccaaatatattaaacacaaaagtcatgcatgattttctttaataagtatcgagcaatatggttcgggtgtctttcgtctcatacctctattgtcctccgtgatcaacaagggtggatccgggtggtgcaagggggctcaagcccccctacctctcccaaaggagaaagaagggagaagaaagtgaaggaagaagaaaccccctatattctaatgctacctccgccactgctgatcaacacaacattcttaaaaccatttccttggcatttgcgcatgttacaaggtacaaaagagccagcccatatgccaagttactaaactaaactatgatccaccatggagcgagaacaaacgtcaacaggcatcaaccaatgcagcaatcttgatcgctagtactgtccggcattatatctgaaacaaatccagatcacccatctcatcacagtcacatgcattcatggtcacgggaaccgttagcaaaccaccaactaatcagcattgcaacactcttcctcctataaatgcagcgagcgggggacaccataaaccatcacaggcacttag

SEQ ID NO: 89 - DNA, 1563 bp, Setaria italica
  source 1..1563: mol_type = genomic DNA
agacccagcaacctaccgagggggtacccgaggtagtgttttgtggtggggctcgtcgaagatcaggaacttgaaggtgaactcgaacacacgatttagacaagttcgggctgcttatgccgcataataccccatgtcatgtgtgttggttggattgtattgattgatcagatatttggagggggccctgcctcgccttatattgcccattgccggaggcagggctacaggtcggttgttgtacaagagtactagtcggttttgaccagcgagtcctactctaattgctacaagtagtttcctaatccttgactagtccttgtccgccacgtagaccacgacgtcttgcacctagtctctgtgtttgatacatcttggtgtacagtccgatattgtaggactatccaagcttcccagtaggcccatagatgtatggccgacaactggataatgtaactctgggtcagtactatccttatctatatagacacaaacaacgtactatagcagaagtttaagctcgtaacccaccaatatttggtggcatagaccacgtattgctgatatagtgctcgtaacccaccaatatttcgtggcatagagatctcttaggcaataaattagcagtacgaaacaatctatgtccacgtgttgctaatacaatgttctaaaccttacagcctactggacagttctctagccatgatacatgtgcatgtccgaacaaatatttatgggtacccgaaaggttaattttttgtagtatttatgagggggaggggggcgttgacgaaaaaaataacttagctaagcgtaattggcttaaaaacatacaatgttgttccagcatcaagcctacgtgatcatttcacaaaaccaactcaaaagataggtgtcatgttccttttagtgcaaaacttaaggacacctaccttgcaaaacttagctttgttacccagaatgaaccgctaagctcgaggagctctgaacttacatgaccaaatatattaaacacaaaagtcatgcatgattttctttaataagtatcgagcaatatggttcgggtgtctttcgtctcatacctctattgtcctccgtgatcaacaagggtggatccgggtggtgcaagggggctcaagcccccctacctctcccaaaggagaaagaagggagaagaaagtgaaggaagaagaaaccccctatattctaatgctacctccgccactgctgatcaacacaacattcttaaaaccatttccttggcatttgcgcatgttacaaggtacaaaagagccagcccatatgccaagttactaaactaaactatgatccaccatggagcgagaacaaacgtcaacaggcatcaaccaatgcagcaatcttgatcgctagtactgtccggcattatatctgaaacaaatccagatcacccatctcatcacagtcacatgcattcatggtcacgggaaccgttagcaaaccaccaactaatcagcattgcaacactcttcctcctataaatgcagcgagcgggggacaccataaaccatcacaggcacttag

SEQ ID NO: 90 - DNA, 915 bp, Setaria italica
  source 1..915: mol_type = genomic DNA
gtgttgctaatacaatgttctaaaccttacagcctactggacagttctctagccatgatacatgtgcatgtccgaacaaatatttatgggtacccgaaaggttaattttttgtagtatttatgagggggaggggggcgttgacgaaaaaaataacttagctaagcgtaattggcttaaaaacatacaatgttgttccagcatcaagcctacgtgatcatttcacaaaaccaactcaaaagataggtgtcatgttccttttagtgcaaaacttaaggacacctaccttgcaaaacttagctttgttacccagaatgaaccgctaagctcgaggagctctgaacttacatgaccaaatatattaaacacaaaagtcatgcatgattttctttaataagtatcgagcaatatggttcgggtgtctttcgtctcatacctctattgtcctccgtgatcaacaagggtggatccgggtggtgcaagggggctcaagcccccctacctctcccaaaggagaaagaagggagaagaaagtgaaggaagaagaaaccccctatattctaatgctacctccgccactgctgatcaacacaacattcttaaaaccatttccttggcatttgcgcatgttacaaggtacaaaagagccagcccatatgccaagttactaaactaaactatgatccaccatggagcgagaacaaacgtcaacaggcatcaaccaatgcagcaatcttgatcgctagtactgtccggcattatatctgaaacaaatccagatcacccatctcatcacagtcacatgcattcatggtcacgggaaccgttagcaaaccaccaactaatcagcattgcaacactcttcctcctataaatgcagcgagcgggggacaccataaaccatcacaggcacttag

SEQ ID NO: 91 - DNA, 2024 bp, Setaria italica
  source 1..2024: mol_type = genomic DNA
gtcggcattgtgataaaaagagagcgcgattactgatgtgcaggttctcgattgttgatgaagtcgactagtcggagtcgattctgactagttattgattgtatggaacccgccctcgactagttttctagtcgagacgagtagtcgaagtagaccatcctcaactacttttctagttgagatgagtagtcgaagtagtcgtcggcgacttgattatttgcctcaatctgtgtgtgacttgatcgacgagccgtatgcagcagcttgcggtggaaaccgactcagtcttcgattggaacacggagcgcgtcaattctatgtcgacgtagatttgtctgcttggaactccaactcagtgacttgcttcttgttgagtagattgatcttgatgatgaggtccttcaagctcgcctgatgatctcgacgatcacctctacctgacgcgccaactgttggtgcttagacccagcaacctaccgagggggtacccgaggtagtgttttgtggtggggctcgtcgaagatcaggaacttgaaggtgaactcgaacacacgatttagacaagttcgggctgcttatgccgcataataccccatgtcatgtgtgttggttggattgtattgattgatcagatatttggagggggccctgcctcgccttatattgcccattgccggaggcagggctacaggtcggttgttgtacaagagtactagtcggttttgaccagcgagtcctactctaattgctacaagtagtttcctaatccttgactagtccttgtccgccacgtagaccacgacgtcttgcacctagtctctgtgtttgatacatcttggtgtacagtccgatattgtaggactatccaagcttcccagtaggcccatagatgtatggccgacaactggataatgtaactctgggtcagtactatccttatctatatagacacaaacaacgtactatagcagaagtttaagctcgtaacccaccaatatttggtggcatagaccacgtattgctgatatagtgctcgtaacccaccaatatttcgtggcatagagatctcttaggcaataaattagcagtacgaaacaatctatgtccacgtgttgctaatacaatgttctaaaccttacagcctactggacagttctctagccatgatacatgtgcatgtccgaacaaatatttatgggtacccgaaaggttaattttttgtagtatttatgagggggaggggggcgttgacgaaaaaaataacttagctaagcgtaattggcttaaaaacatacaatgttgttccagcatcaagcctacgtgatcatttcacaaaaccaactcaaaagataggtgtcatgttccttttagtgcaaaacttaaggacacctaccttgcaaaacttagctttgttacccagaatgaaccgctaagctcgaggagctctgaacttacatgaccaaatatattaaacacaaaagtcatgcatgattttctttaataagtatcgagcaatatggttcgggtgtctttcgtctcatacctctattgtcctccgtgatcaacaagggtggatccgggtggtgcaagggggctcaagcccccctacctctcccaaaggagaaagaagggagaagaaagtgaaggaagaagaaaccccctatattctaatgctacctccgccactgctgatcaacacaacattcttaaaaccatttccttggcatttgcgcatgttacaaggtacaaaagagccagcccatatgccaagttactaaactaaactatgatccaccatggagcgagaacaaacgtcaacaggcatcaaccaatgcagcaatcttgatcgctagtactgtccggcattatatctgaaacaaatccagatcacccatctcatcacagtcacatgcattcatggtcacgggaaccgttagcaaaccaccaactaatcagcattgcaacactcttcctcctataaatgcagcgagcgggggacaccataaaccatcacaggcacttag

SEQ ID NO: 92 - DNA, 2087 bp, Setaria italica
  source 1..2087: mol_type = genomic DNA
gaaggaaagcgggatctccaaaaccactgtcgcgagacctgcatggggcagcaatcagatttttgggcagcgtcttcacgcgaccgcttggtgattctgcaacatccgcttcaacacgttcgactagttctgcgccggatcttgttctagataatatgttgcctgcttacttgtattatttgcttgcatcagtttttatcaatgtgtttttgcttcagataaaatctggaatattttttaggcacatatttccaacaacctacactcagctcgcaagtttaactgatatattgttcacatgcatgatattgttcgttgggagctcactcaaggtaagttgtatggctgcttttatgtttactcaaggtaagttgtatggctgcttttatgttttaagagtcaacactcggcaccaatcaagagcattttcaatctggttctttttttttttttgctaatttgtgatgatctggtttctagggtcaactgacttcttgcatccgcacagtacagtcagcttatattttaggagtatcgcgtcatgtgaatttcggcacaacgtacgacggtgcaatgtgccgttactgtcatccactcatcttttcaacgtcctcgatatacgtgttctatatgattccaaatttaacttttattggtattttgtacctggctgagtaatgcatggtcatgttcttttagctttgttaaatcggcaaagaatgatggagtattaagtactacgaacgaaaggcagcatggccgccacggccgtgcgtgtccgctagcctatggcacccgatacggcctcgctgggtgctgcggcagcgattaggaaatatggaaattaggataagtcaaaaggacgatttccccataagcaagttttttttatcagtggagaaatctatatatatacgattacaaggatgatacacatacacataggcaaatcgtactcacaaccaaaagagtgagccttctatcaaacatctataaataaattgctgaaagtacttgcacgtgcgcaagtcataggcactacgatgtgaaatcgatctagtggtaactacttcctctgatgataaatatatgtaagttcatctttttctaaatcaaacttttatctttgatcattaatatatagtaactcatgtagtagtttgaaaatatgagattaatgtcaacatatttattataatacatttcgataatatagatttttaaaattaaagtgacacaccataagcatggattttatttgtgatcggagaaggaatacaaaatttcgaagtcatcaattagacaaggcaatatacaaccgaataggtataaaatgtactggctattttttttctttttttaaaatatacagtacagacgcatatatacacatgcgctcaccctcaccctatgaatgtatgcctacacaacctacctgtatatgagcatcacgagagactaaaaaattactagtgataatataaatgcgagcacatatatatgcttgtcgtacattgaggcaccctaagatatgatgtggttccccttaataaccctatagaagagatgtcgatcttggctggaaatcttgatcgcaaatgtacatacccaacacatgcacacttgatctgtatgagtatcaattgagattgcgttgacatcacatactccaagcgtcacatggccaggctgatctccaagattattatacagtgatgcacacttgtcaaggtattattagcccgtaacacatgcaaacttgatctgtatgagtgtcaattgagattgcgttgacatcacatgctccaagcgtcccatggccaggctgatctccaagattatacagtgatgcacacttgtcaagctattattagcccgtaacacatgcacacttgatctgtatgagtgtcaattgagattgcgttgacatcacatactccaagcgtcacatggccaggctctccaagattatacagtgatgcgcacttgtccaagctattattagcccgtacgttgcgagcgggcgggtataaaacggaggctggtgagctccttatatcacaccaaagtgcacaagctaacctaag

SEQ ID NO: 93 - DNA, 1128 bp, Setaria italica
  source 1..1128: mol_type = genomic DNA
ttcgcccttactatagggcacgcgtggtcgacggcccgggctggtattctactgacccacggttcactcgtatgttatccatccagctcaatttttcacggataccgcaagcttaacagtgggtgactgtgtaggtgatcacttggattttggggtgagcaccttgagtccacccacaaagggtcttattatgccagtctcaatagtggatttcatgtgagtttcattagcattaaattctatggtacattagcaattttgctaacttggcaggattattaagagaggagagaaagtttcattagatgagagagcaatttcatccccataaaacccatcagactcagtgcaatgaaactgtgcacggagattggccttagaggctcttgaatcacaatcgacccgtcttcctactgaaaattctccagaatgcacgctatcagaagaggagcctctagtaccgtggttcgactctccgtgggagcaaattaaagtgatctagaataaaaaaatgtacaaaaaataggttgggtttctcctactaacttcagtcaaaaaaaagatagctaaacaagatagctcttgcgttgagtgtatggataaattgagttggcccgccagctgccttccctttcttagattatgtttggggttcttttcgtcatagcgtatttttcactcaacaatgtgtctccttatccctttcatccatgagtaatggctcttggaacatatcctactttagataggtgacaaattcagcttaaaaagatttagatccacatcaccatatcacaactttacagactctctttaataaagtggaatgcgtatgatgtgaccgatgccttcacatgtcttatggtgaacttgtgatgatattgtcacccacggtatcaagaaaataccaacaagaaaagtcacttttttccttttattaagtgcatattttgttgccaacacataccgtacaacctaagaaaattaatcactaaatgttgaaattgactagataccatgtcatggcttggttatctagataataatttgcttaggaaaagcaaaaatcatgctagagctatatgatctctcaagagtataaataggtcccggatatgtagccaatct

SEQ ID NO: 94 - DNA, 479 bp, Setaria italica
  source 1..479: mol_type = genomic DNA
gggttcttttcgtcatagcgtatttttcactcaacaatgtgtctccttatccctttcatccatgagtaatggctcttggaacatatcctactttagataggtgacaaattcagcttaaaaagatttagatccacatcaccatatcacaactttacagactctctttaataaagtggaatgcgtatgatgtgaccgatgccttcacatgtcttatggtgaacttgtgatgatattgtcacccacggtatcaagaaaataccaacaagaaaagtcacttttttccttttattaagtgcatattttgttgccaacacataccgtacaacctaagaaaattaatcactaaatgttgaaattgactagataccatgtcatggcttggttatctagataataatttgcttaggaaaagcaaaaatcatgctagagctatatgatctctcaagagtataaataggtcccggatatgtagccaatct

SEQ ID NO: 95 - DNA, 1444 bp, Setaria italica
  source 1..1444: mol_type = genomic DNA
gttgtttggtagctgggtttagtagagatcaccaacttatctgctattatttctcttatgcatggcacagtactctaagacacaacaataccaatgaaacggaaatgttacattaagctaatattttgtcatatcttaacatcaccgtcacaattaaggggacacatcccagcagatgtcatgtttattttctgcccatggcacccaactggtttagggtgaggtattcaaattcaattttgaaatatccagcacgcttaatgcatattcatctacattatatattaatttcaatacaaaaatattctccaccagaaatttgacactctggatttctgatacatttcaattttttttttcgcagaagccgcatgagcttgcttaatgtttggcatcaggagaagagcataaacaagtctccttttccatagtgcaccgcataagtcagaacgggaaaagctttgaggtagccaaaggattcagcaaatctgccgcagacctcaggagctttccagcgagtataaatgcaccttcaattcacccaccatacttctttcaaatatactcgaccctactttatccaaagggttaagcactaataagttaaataacaggcaacttgtttggaacatatattctcctgacctatagcattcccaaacagagagaaaccaggcagtgtggaaatgtctaagtttctcttcaagggaaaatactgtggtgttggtgcatgacaagtcagtgatattgacctatcaacacgaagtcacagtctcatagataatgtcaaacaaaccctgtttcctgcagccaaaatattcttgcaaggattttaatttccgaagtcaaacaaaccttggctcccaaaatattcttgcaaggattttcatttccagatagaaatgtggatgaaagtctagagcaactccccaattttatttttttattttctagaaaatggtattgtgggccatttttcccctcccacctccatctccccagtgatccttatttactgagtacttgctcgtcccagaggggaggtcagagggcagccaatgagggatgaaagttggttggaagaagtagggggacagaaatcctgacaaaggcctaccacatctcccaccccatccctcctcggccctcatttctctcttgcctctgaaaactgaaggcaggacagtctcatagggcatgctcaaaaggacacaagatcttcttggggcacagtagtatatgaaaccacaagagggattcgacttaccactgtcggagaagactaacaaggaaggaagcaaaggcctaccatatggtatttatatatgccccttctctggtcctttcttgaacatgtcacacatggacgcgtgctaacatgcatgtgtgaacctatctcagtagctcattaatctctctttgcagcttagctctgctcactctc

SEQ ID NO: 96 - DNA, 917 bp, Setaria italica
  source 1..917: mol_type = genomic DNA
tgtactgtcatattgtcgtggtttttcaattgctgtacctgatgcaaacgtaatgggtttactaatcttgcacccgccggcttcaaaatgaagagtgctaatttggtccacgtcaccatcaccggttcgaactgtctagaatggcaggcaaagatgattggacaggcatgcagggaaaaagagcaccgttgacgatgtatgcgagttcccaccattgcgagcaatgattatcagccacacgacttactcttcagagctaaccactgccatgcagagaaaaagtgaatcatattgtcatgatctacaacgaagtgaaacaatcaggcatgctaaagtgctgaaactttactgatctctcatgttggacaacaaagaatacgggaatacatcagcaacgcaactcttgagctttgcttgccgaatgaccagctagaatttccaagcatttacagaaacatgactttaagtttcagaaaaacaaatacaaggccactaaataagcgtggggataacatatcctccagatgacaggcaatctgcaacttgcagccattcaaatgtacgattaacaaaatatttaagcgccacatgagataatatatcctccaattagggcctttagtattgtcattagctcataaccatggtgcatcctcacatggacgctgcataagaagttcataatagcaacagacatatgaacaaagcatggtgcgcctgcccggccggactagctagtactaccaatcatggaataagctagtaccctaaatgaaattaaaatggtttttagcgattatccacgccgtccagaatactctaatccacaagttgaggccgcccatgaagccgcgagagggcgacgccatgtgtataaaaggggcctaagctgagtggacttgctgcatcagattagt

SEQ ID NO: 97 - DNA, 2108 bp, Setaria italica
  source 1..2108: mol_type = genomic DNA
gacttttcacgctgagaaactgtcaggaagctcaaacaaacacagcctatacagtgattctgtaccaatcaaaccactcacaactcaccaatgtacctgtttattttccaaatcaaccattgctgtggggcttgtgggttatgacttatgagtatgagcagtattttcccccctggaatgcaagtggcagatagcttctgagatctaccatgcaccctggtaaagctcctaccattttatttgcaatagtagatgcatataattgatggacacagagttctgaaccgtgagattttctttaacttcagagttctgtcactatgttaacgtggatctggagttttgcaggaactgtgaagaaggaaccgtacctaaaactaaaagtctcacgaagaccaaatgggcaagccagacagtcagagagacagggcttcttcggccaactggacaagggatgtgccatcatgtgctgagagattaccaaatccgcaatttgcagacgtgccttctcaatcagtttgcacaaagcgataaggtaaacaaccattggagcattgttaacagcagcctagcatggcaggatgcgtcatctgaataatgcggagggcaggacagtaggacaggacacctaatccctgcaaattctagtggctctgggacactgatcatggcccaaaagtgctaaccactgcattactaaaacgtgtgggtgttgcgagttccaagttggctgttgtcatggaatggtatgaaaatgcaaaagattctcgttgttttgttgagagttagtaaattgggatgacttcggcatgacaacagcacaaaccttacatatttggtaagacttgcaacaaaaatcaaaagaatgctagtagataccaacaaaaagaaaaaacagagctagcatgaacacttctttgatcacagttgatcaaaggtgtatggccctcagacaaagctgttgatgatggtcaaacacttttgctaccgaatatcgcagttgtcctttggtacattcacaagtttgatcttatcatcaccatcagaagttcagaaagtctcgatgaaaacaaatggaaatgaatactgcttacttagctcaaattcatattccgttgttacaggatacttaaaaaaggtaccaaaggctgttcctaatcatacgctgaagtcgttgccaccaatggcagctgtactgtcatattgtcgtggtttttcaattgctgtacctgatgcaaacgtaatgggtttactaatcttgcacccgccgacttcaaaatgaagagtgctaatttggtccacgtcaccatcaccggttcgaactgtctagaatggcaggcaaagatgattggacaggcatgcagggaaaaagagcaccgatgacgatgtatgcgagttcccaccattgcgagcaatgattatcagccacacgacttactcttcagagctaaccactgccatgcagagaaaaagtgaatcatattgtcatgatctacaacgaagtgaaacaatcaggcatgctaaagtgctgaaactttactgatctctcatgttggacaacaaagaatacgggaatacatcagcaacgcaactcttgagctttgcttgctgaatgaccagctagaatttccaagcatttacagaaacatgactttaagtttcagaaaaacaaatacaaggccactaaataagcgtggggataacatatcctccagatgacaggcaatctgcaacttgcagccattcaaatgtacgattaacaaaatatttaagcgctacatgagataatatatcctccaattagggcctttagtattgtcattagctcataaccatggtgcatcctcacatggacgctgcataagaagttcataatagcaacagacatatgaacaaagcatggtgcgcctgcccggccggactagctagtactaccaatcatggaataagctagtaccctaaatgaaattaaaatggtttttagcgattatccacgccgtccagaatactctaatccacaagttgaggccgcccatgaagccgcgagagggcgacgccatgtgtataaaaggggcctaagctgagtggacttgctgcatcagattagt

SEQ ID NO: 98 - DNA, 1593 bp, Setaria italica
  source 1..1593: mol_type = genomic DNA
tagcgtagcaggctagcagcctgaactctcgggtgattctgtggcgagttagcttgctcgctgcctgcaatggagtgaatattggcagtacgaagtcacacgggcaggcagagatttggaacatggtggaaacaagaaccatcggcatcgttcttctgatcaatatagtgattactggaagaatcaagaacagaataaaaccaaggcatcctggatctaccatgtcaatctttgctttcatcctcgtcgtttggagcgagcctgttcttgtttgaggcgcgctcgaccgtgccacgaagtaacaggtgcatgaggtctgcagtctgcactagaacttcccagctcccaaattcaacgaaactgaaaaaagtcattggtaacatcaaagtcttgtcttaggatagctgctgttcttgacgctggttagatttgtccaataaattacatgaccagcgcacatgtacttggtattcgacttgatgatttgtatgtactgacggacttgaataaagtagggggaattaggactcagaagtctacgatttttggtccaatatttgattgtgatgttcaaagtcgacgtctctttcgagacgaaattgtgatgcgtagaacaaaaacgacgcaatttcttttcaaaagaaaaagattaggggcagaacaattcaggatctgtttggctggacttataagccggctgaaaagctgaaacggttgatttattgtgagagaaaaacactgtttggtggctgataagctgaaacgaacaggctgtcagtcattaggctgccggctctggaacagtgcgccatcaagagatcacccgaaccatgttgagctcatcaacgtgcgccgctgttgtgctcattggtgtcgcggtcgtggctggcgcgcatctttcgttgcgtcttgtcatggattatccacgacggcagtgtcctgttgtttatgatgacggcacttgattcgccatggatggtgaaaacgaaatcgaagtgcggtcattttttattttaccagatgacgtggttggtgacctgagaggaacagacatgagaagatgagatcagcagctcaattcccacattgacagacgacctttggagcagtacaagagacccaaatgaagaatagtgcaaattacagagtatattagaacacgagaattattaagttttactcgaggtcaatgaaagaatttaggactattcagagcacaggctgtgttcaagtcctgcatgaaccagagaaagttcccaccaaggcctccatcagaggaacgaatttgcctggaactccatcactcaccagtcaccactcaccacttaccagcctaataaagcgtagcagacaatttggagtagacgatcatcatgtgcagtctcataggccctcttctaggaataaccgtatttgatagccaatccacctatgtggtgatttttttttcctttgtccatcggggtcgctttccatccgacgtgtctgcagtgtagcgcaatccatctgtcgctttctgctttctgatgaacgttccggttgacgccgctaagctgccttgtcctccttttctcccgtctgcacagggagggg

SEQ ID NO: 99 - DNA, 856 bp, Setaria italica
  source 1..856: mol_type = genomic DNA
actgtttggtggctgataagctgaaacgaacaggctgtcagtcattaggctgccggctctggaacagtgcgccatcaagagatcacccgaaccatgttgagctcatcaacgtgcgccgctgttgtgctcattggtgtcgcggtcgtggctggcgcgcatctttcgttgcgtcttgtcatggattatccacgacggcagtgtcctgttgtttatgatgacggcacttgattcgccatggatggtgaaaacgaaatcgaagtgcggtcattttttattttaccagatgacgtggttggtgacctgagaggaacagacatgagaagatgagatcagcagctcaattcccacattgacagacgacctttggagcagtacaagagacccaaatgaagaatagtgcaaattacagagtatattagaacacgagaattattaagttttactcgaggtcaatgaaagaatttaggactattcagagcacaggctgtgttcaagtcctgcatgaaccagagaaagttcccaccaaggcctccatcagaggaacgaatttgcctggaactccatcactcaccagtcaccactcaccacttaccagcctaataaagcgtagcagacaatttggagtagacgatcatcatgtgcagtctcataggccctcttctaggaataaccgtatttgatagccaatccacctatgtggtgatttttttttcctttgtccatcggggtcgctttccatccgacgtgtctgcagtgtagcgcaatccatctgtcgctttctgctttctgatgaacgttccggttgacgccgctaagctgccttgtcctccttttctcccgtctgcacagggagggg

SEQ ID NO: 100 - DNA, 979 bp, Setaria italica
  source 1..979: mol_type = genomic DNA
agtaacaaatcatacagtatttgccttctataaaggcagctggagactgttctccgaaataaatcatagcaacttaggagtgtttgatacgaggcgctaaacttcagcaggtcatatcggatgttcggatactaattataaaagtcaacacgagctaattacaaaactaattgcacagatggagtctaattcgcaagacgaatctattaaggggctgtttggatacgaggtgctaaactttaacagtgtcacgtcggatgttcggatgctaattaggaggactaaacatgagctaattgtaaaactaattgcagaaccctgtgctaattcgctagacgaatctattaagcctaattaatccatcattagcaaatggttactgtagcaccatattgtcaaatcagggactaattaggtttagtagattcgtctcgcgaattatactccatctgtgcaattacttttttaattagtctatgtttaatactcctaattagtatccaaacatccgatgtgacaggtgttaaactttaacagggcgttcccaaacacccccctaaagctaattaatccatcgttaacaaatagttattgtagcacaacattgtcaaatcatggactaattaggcttaatagattcatctcgcgaattagactccatctgtacaattaattttataattagactatatttaatacctccaattagtatcaaatattcgatgtgacatgtgctaaagtttagtagggtatccaaacaccccttctctcctttcctcttggtatgtttagcagttacccctggctcttggcatccgtttcgtcgacgtgccatggtttaacggacgggacggggacggccggctcacgtgaacaacgcccacgaggccgcgctggctcttgtaaaagcaaccgctccctccctagacgctagtgcctctttcctctctcctccgcccctttttatcgcccgatctca

SEQ ID NO: 101 - DNA, 723 bp, Setaria italica
  source 1..723: mol_type = genomic DNA
ttcaatttcactggagatcgttccaccagagaaatcaccgtcggagtaattttaggatgaaaggcccaaaagcctaaatggcaggcctaccccagaggcccaagcgatcaagggtagctccgtactttcccgcgacggtgcgatacacggttcgaaatttcaaaattcgaacgggcggccaaacagccgttccttccatttccctgccgtcctcacaaaggctccccttccatccaccgaagtgaaaactaccccgactcaatgactcatgggctgggcagttcactttcatattccagtcccacatgtcagtgtcacgtcttcacgggcgcatgtgaagatcgccgagaacgagaggcgccggctccgcgggacccgccgccagctcaaacccaccgttgccggccgctgatcacgcaagcctcgccccgacgttcgaaaccaaacggccgttaacctccgctgcccccgcgcggcttcggccccgttcaccaacgaggcgggccaccaccacgccgtctaacgcgagccaaacggcggttaggtcacggcctcaccctcacgggccggccgcggccgcctcccctctcctctcgcgctgcctataaaagccgccgcggccgcctcccctctcctcacctcggcgtcttcacaaacgccagcgctccccttccactcccgatcgatcgccgctccgctccctcttccctcgcctccgcctcc

SEQ ID NO: 102 - DNA, 1492 bp, Setaria italica
  source 1..1492: mol_type = genomic DNA
actgccgcgacacgcctcactggcgggagggctccgagcgctctctccccggcggccggcggagcagcgatctggattggagagaatagaggaaagagagggaaaaggagagagatagcgcaaagagctgaaaagataaggttgtgcgggctgtggtgattagaggaccactaatccctccatctcctaatgacgcggtgcccaagaccagtgccgcggcacaccagcgtctaagtgaacttccgctaaccttccggtcattgcgcctgaaagatgtcatgtggcgaggcccccctctcagtagattgccaactgcctaccgtgccactcttccatgcatgattgctcccgtctatcccgtttctcacaacagatagacaacagtaagcatcactaaagcaagcatgtgtagaaccttaaaaaaaggcttatactaccagtatactatcaaccagcatgccgtttttgaagtatccaggattagaagcttctactgcgcttttatattatagctgtggacctgtggtaacctttctcttttggcgcttgcttaatctcggccgtgctggtccatgcttaggcactaggcagagatagagccgggggtgaatggggctaaagctcagctgctcgaggggccgtgggctggtttccactagcctacagctgtgccacgtgcggccgcgcaagccgaagcaagcacgctgagccgttggacagcttgtcataatgccattacgtggattacacgtaactggccctgtaactactcgttcggccatcatcaaacgacgacgtccgctaggcgacgacacgggtaatgcacgcagccacccaggcgcgcgcgctagcggagcacggtcaggtgacacgggcgtcgtgacgcttccgagttgaaggggttaacgccagaaacagtgtttggccagggtatgaacataacaaaaaatattcacacgaaagaatggaagtatggagctgctactgtgtaaatgccaagcaggaaactcacgcccgctaacatccaacggccaacagctcgacgtgccggtcagcagagcatcggaacactggtgattggtggagccggcagtatgcgccccagcacggccgaggtggtggtggcccgtggccctgctgtctgcgcggctcgggacaacttgaaactgggccaccgcctcgtcgcaactcgcaacccgttggcggaagaaaggaatggctcgtaggggcccgggtagaatcgaagaatgttgcgctgggcttcgattcacataacatgggcctgaagctctaaaacgacggcccggtcgccgcgcgatggaaagagaccggatcctcctcgtgaattctggaaggccacacgagagcgacccaccaccgacgcggaggagtcgtgcgtggtccaacacggccggcgggctgggctgcgaccttaaccagcaaggcacgccacgacccgccccgccctcgaggcataaataccctcccatcc

SEQ ID NO: 103 - DNA, 680 bp, Setaria italica
  source 1..680: mol_type = genomic DNA
cacgggtaatgcacgcagccacccaggcgcgcgcgctagcggagcacggtcaggtgacacgggcgtcgtgacgcttccgagttgaaggggttaacgccagaaacagtgtttggccagggtatgaacataacaaaaaatattcacacgaaagaatggaagtatggagctgctactgtgtaaatgccaagcaggaaactcacgcccgctaacatccaacggccaacagctcgacgtgccggtcagcagagcatcggaacactggtgattggtggagccggcagtatgcgccccagcacggccgaggtggtggtggcccgtggccctgctgtctgcgcggctcgggacaacttgaaactgggccaccgcctcgtcgcaactcgcaacccgttggcggaagaaaggaatggctcgtaggggcccgggtagaatcgaagaatgttgcgctgggcttcgattcacataacatgggcctgaagctctaaaacgacggcccggtcgccgcgcgatggaaagagaccggatcctcctcgtgaattctggaaggccacacgagagcgacccaccaccgacgcggaggagtcgtgcgtggtccaacacggccggcgggctgggctgcgaccttaaccagcaaggcacgccacgacccgccccgccctcgaggcataaataccctcccatcc

SEQ ID NO: 104 - DNA, 851 bp, Setaria italica
  source 1..851: mol_type = genomic DNA
cgggcgggtctgtgccacgtgcggccgcgcaagccgaagcaagcacgctgagccgttggacagcttgtcataatgccattacgtggattacacgtaactggccctgtaactactcgttcggccatcatcaaacgacgacgtccgctaggcgacgacacgggtaatgcacgcagccacccaggcgcgcgcgctagcggagcacggtcaggtgacacgggcgtcgtgacgcttccgagttgaaggggttaacgccagaaacagtgtttggccagggtatgaacataacaaaaaatattcacacgaaagaatggaagtatggagctgctactgtgtaaatgccaagcaggaaactcacgcccgctaacatccaacggccaacagctcgacgtgccggtcagcagagcatcggaacactggtgattggtggagccggcagtatgcgccccagcacggccgaggtggtggtggcccgtggccctgctgtctgcgcggctcgggacaacttgaaactgggccaccgcctcgtcgcaactcgcaacccgttggcggaagaaaggamtggctcgtaggggcccgggtagaatcgaagaatgttgcgctgggcttcgattcacataacatgggcctgaagctctaaaacgacggcccggtcgccgcgcgatggaaagagaccggatcctcctcgtgaattctggaaggccacacgagagcgacccaccaccgacgcggaggagtcgtgcgtggtccaacacggccggcgggctgggctgcgaccttaaccagcaaggcacgccacgacccgccccgccctcgaggcataaataccctcccatcccgatgccgcaagactc

SEQ ID NO: 105 - DNA, 2215 bp, Setaria italica
  source 1..2215: mol_type = genomic DNA
gttccatatatagagattggagtaaaaaataaaaaatagcatatttctatatgttatagtctattgttggtggatgtgaaaacaaaacatcttgcacaaggtgtccaggagccccaccgtcatgggtcaacgcggagagctggtatgaagcaacggtacaaaaacagtgctattggctaggagatgaatacagtttagggtagctgctgggtaagggactaaagggtatgggttactttactgaacctcaagtgcttgtcagcacctcggctcgtcgttgcaatgcaagctgtgcctgtgaccgggtcgcctgaaaggcaaggcaaaccacatgctatgatggctgctgcgccgagaaaggaggtagctggttgggaatttgataactgagtcagttaagtgtaatgggtaacttctctctttttctgatgaaatctcctcattatgatctcatcaagtcagcaattttgctgatgtggtaataaattaatacgcatgaaactcctatgaaactaaagttataaccactctcacatgcacataaataaacacacatattggatccatagccacactgtaggttatttacaagcattggagtaacaatgtgcatcgatctagagcacagttttctcattgcatcgatcactcgatcatcacccgtggcatttcctaatagtggctactccaatatactattatgtataacaactactaccgtgtgattgaggtgaggaatcttgctgccccacacaaaagccaatccctaccgtctcttggctggagttgacggtacacggaagccaatgccaataatgtcaatgcagcgccactcccacgcatcatcagaactacaacgcgctagttatgtttgcgccaatgatttcattggcgtacgtgcttattatcctgtggttagggcctatttagttgcctgattttggacaaccaaaatcactatgccagcactgtagcatattgtagcgtttcgtttatatttgtgaattattgtccaaatattgactaattaggctcaaaagattcgtcttgcaaaatacaacaaaactgtgcaattagtttttgatttcgtctacattcagtactccatgcatgtactgtaagtttgatgtgatggggaatcttcttttttacatagtgtcaaagttaggattttagggtaactaaacaatgccttagttgatgacaaactggcttcagaattactacacattggatccattactaagatgcatgttatccagatgtatataaatatcatttcaaccaataaaagttgagatgcagacatgcatatatagtggtctctagaagaagaatatatgtatatgtatgacagtagaaggtgtcaatgtatacagacatgtcaatagaacctgatgaccaaggtgtgatgagttccctttcgattgattagtatttgcagagatgggatgatgcttccattcaatgtaaacgcctaatgaatataaacggcaatctaaagcaacttctatatatcctacaagtgtttagaatagttaacaataagctactagctagctcgtggaagccatgaacacaggttagcttgctgccggacttttgggtctccccaattagcctccacactaacgtggagacctgtaaacaaacattagtttatgcgcagccaaccgacgatcgatgatggattggaaaagaataatgtgaatgtgtatgtaaactaagtaagatggtgtgtatgcaggccacaatcattgttaatcactgttgctttggttcggtttggttcacatgacgattaagcaaatgcacatggccatccgtgaataatctccgttgtatgctgcaaggaagagatagagcagtaaggacattgccattttatctgcaatacgcaggtaccgggtcgacggcaagaacagggtagttgagtgagtccctccctcccaacagctaccttggcttggggttgctgcgactgcgagcgcggtcaaaagaattgccgcgtcccccgtctgtccggccaccaaccccggccgtcaaccatgcctgcatgatctgtcagtcactacagtactattattccagcaggcgtaggctctgacgacacgaccgccaccttccatgcatcccggcgacttctctgctccactccattccatccatccatccatctatataagctagccaggccacccggtgtgcaggagcc

SEQ ID NO: 106 - DNA, 92 bp, Setaria italica
  source 1..92: mol_type = genomic DNA
acgagcgcgccgccatccagatccagccgccggaactccgccccctccgccgtcggccccgtcgctccgaccggtcggcttctcccttgctg

SEQ ID NO: 107 - DNA, 13 bp, Setaria italica
  source 1..13: mol_type = genomic DNA
aacaactgaccag

SEQ ID NO: 108 - DNA, 73 bp, Setaria italica
  source 1..73: mol_type = genomic DNA
gatccagccgccggaactccgccccctccgccgtcggccccgtcgctccgaccggtcggcttctcccttgctg

SEQ ID NO: 109 - DNA, 77 bp, Setaria italica
  source 1..77: mol_type = genomic DNA
gtgctcagcagctcaattagcacttagcagagagcacatcttgctaccaagattattggagcaaccgactgccagcc

SEQ ID NO: 110 - DNA, 64 bp, Setaria italica
  source 1..64: mol_type = genomic DNA
attccaatcacccatcaatctagcaacatagacattgaaaccgacaaccaacctcttagcaaca

SEQ ID NO: 111 - DNA, 59 bp, Setaria italica
  source 1..59: mol_type = genomic DNA
aatcacccatcaatctagcaacatagacattgaaaccgacaaccaacctcttagcaaca

SEQ ID NO: 112 - DNA, 29 bp, Setaria italica
  source 1..29: mol_type = genomic DNA
caacccatactcaccagtagtaactcgca

SEQ ID NO: 113 - DNA, 41 bp, Setaria italica
  source 1..41: mol_type = genomic DNA
cccctcctgcaattcttcctctgaactgtgggtctgcggca

SEQ ID NO: 114 - DNA, 43 bp, Setaria italica
  source 1..43: mol_type = genomic DNA
ccaccgagtcggcagctgaacacaagcaacaagcaagtgatcc

SEQ ID NO: 115 - DNA, 72 bp, Setaria italica
  source 1..72: mol_type = genomic DNA
ggtctacacgcacccacccaatccatcgtcccagctgcagagcgcgcaagaacactccaaagcagctgagct

SEQ ID NO: 116 - DNA, 202 bp, Setaria italica
  source 1..202: mol_type = genomic DNA
cgaaggttaggaataatagtgccgagagcaatcaggcaacacacaccaaccctgctaaactcccgggcctcccagctcataaatagagtatcgctgcgaggccgagcagtgggcgaccctgtgagcttagctagcaagcaatcaagcactgccacctgcaacctcacggagaaagttaaggcggcgagagacagagagatcc

SEQ ID NO: 117 - DNA, 14 bp, Setaria italica
  source 1..14: mol_type = genomic DNA
ttctacttccacca

SEQ ID NO: 118 - DNA, 137 bp, Setaria italica
  source 1..137: mol_type = genomic DNA
aggagcttgagctttcactttctagcaatgtatttgggcaggaagtgttcgagactgttggaaaatcatgtccgcaactcaggcgcttcagactcagtaaacatggcttctgcagctttgaagctgctgactacaac

SEQ ID NO: 119 - DNA, 45 bp, Setaria italica
  source 1..45: mol_type = genomic DNA
ggcttcgcgttggtcgcgcgggatacgactcctacgtcgcgcgca

SEQ ID NO: 120 - DNA, 145 bp, Setaria italica
  source 1..145: mol_type = genomic DNA
aaccctaacccctccgtcctccactcctccgccctccgcatcgccacttcgcacgcaggcgccgaacccccaccgcctccttgccggtgcctcctccccctacctcccctcccggcttgcgactcctcccatcggcggctctccg

SEQ ID NO: 121 - skipped

SEQ ID NO: 122 - DNA, 152 bp, Setaria italica
  source 1..152: mol_type = genomic DNA
acgcggtcgtggaccgaacaaacctttccccaaaatttcccctcccctgcaccgaacgaactctcgatccgatcccgatccctgcagggcgccgcctcggctccccgattcggccccggatctgctcgtcgctcggcgggggctctcgattg

SEQ ID NO: 123 - DNA, 20 bp, Setaria italica
  source 1..20: mol_type = genomic DNA
tattgatgattaaatgtcaa

SEQ ID NO: 124 - DNA, 46 bp, Setaria italica
  source 1..46: mol_type = genomic DNA
cctgacgctctcagcacacccaggaggaggaggaggagcagcagcc

SEQ ID NO: 125 - DNA, 97 bp, Setaria italica
  source 1..97: mol_type = genomic DNA
cacagagcttacccactgctgacaggctctgagtgtctaagcttttgtgcgcattggatggccatctatatatacagtatacacatagaaggtccca

SEQ ID NO: 126 - DNA, 31 bp, Setaria italica
  source 1..31: mol_type = genomic DNA
atacaacgcaacgcagcagctgagagtcaca

SEQ ID NO: 127 - DNA, 35 bp, Setaria italica
  source 1..35: mol_type = genomic DNA
gaaacatctacattctccacacgttgagctaatcc

SEQ ID NO: 128 - DNA, 64 bp, Setaria italica
  source 1..64: mol_type = genomic DNA
tcacccccacaaataaataccaatagcaccacattactagattcaggaagcaaaaggcaacacc

SEQ ID NO: 129 - DNA, 69 bp, Setaria italica
  source 1..69: mol_type = genomic DNA
cgtggctgcagccgcacaagaggtgatcgagcacgagcagtaactcgagcccgcacgcaccttctctcc

SEQ ID NO: 130 - DNA, 74 bp, Setaria italica
  source 1..74: mol_type = genomic DNA
caatcaacactttccttcttccttatttattatagaagtacaattcataattgatctagaaaagaccagaacca

SEQ ID NO: 131 - DNA, 52 bp, Setaria italica
  source 1..52: mol_type = genomic DNA
gtgtgtcaaggaaaggatagtgcttgtctccttgtgttcaggaccagaagca

SEQ ID NO: 132 - DNA, 70 bp, Setaria italica
  source 1..70: mol_type = genomic DNA
ggtctacacgcacccacccaatccatcgtcccagctgtagagcgcgcaagaactccaaagcagctgagct

SEQ ID NO: 133 - DNA, 31 bp, Setaria italica
  source 1..31: mol_type = genomic DNA
cccgcccctgctctggtccgtggccaccacc

SEQ ID NO: 134 - DNA, 34 bp, Setaria italica
  source 1..34: mol_type = genomic DNA
catctcaacttagagtcttaggtagtagctcaca

SEQ ID NO: 135 - DNA, 85 bp, Setaria italica
  source 1..85: mol_type = genomic DNA
cgttgatatctcttgcagcgttgggtctctgtcacacacacaggaagcacaggaagctaagctagcagtcgcgagagagcgagcg

SEQ ID NO: 136 - DNA, 86 bp, Setaria italica
  source 1..86: mol_type = genomic DNA
agatttgcagcgcacactgagcgagtacttggcaggccgatcagctcgttgatagcaagctcactcgtcagtaagtagcaatcagg

SEQ ID NO: 137 - DNA, 30 bp, Setaria italica
  source 1..30: mol_type = genomic DNA
gacaaatttgagaggtgcacacaaagaaca

SEQ ID NO: 138 - DNA, 70 bp, Setaria italica
  source 1..70: mol_type = genomic DNA
caacatctcaagcttcctctcgctctttgcataaaagttcttgaggttacaagaggccagattcctgaag

SEQ ID NO: 139 - DNA, 208 bp, Setaria italica
  source 1..208: mol_type = genomic DNA
gggccgcgagcaaagtcaactgctcgacacctcctcggccaacgtgcctatatattctcggctagccgcgtccgtactcatccaacccaactccaagcacctcatcagattcctcgcctccgtctccgaccacccaccagtcaggtaactagctagagaggaagagatcaccggccggcgatcgattattaacgcgtcaggagaagcg

SEQ ID NO: 140 - DNA, 51 bp, Setaria italica
  source 1..51: mol_type = genomic DNA
caacgttttgtgacaaacgtaacacacagagtgacggagagacaaactaca

SEQ ID NO: 141 - DNA, 64 bp, Setaria italica
  source 1..64: mol_type = genomic DNA
cggaacacatagactacaactagaacgatacagcctgtgtgtgtgtgagagagagagagagaga

SEQ ID NO: 142 - DNA, 64 bp, Setaria italica
  source 1..64: mol_type = genomic DNA
cggaacacatagactacaactagaacgatacagcctgcgtgtgggtgagagagagagagagaga

SEQ ID NO: 143 - DNA, 50 bp, Setaria italica
  source 1..50: mol_type = genomic DNA
ccaacgataaggccataactgataagctaacaaagcggaaacatcgtgcc

SEQ ID NO: 144 - DNA, 28 bp, Setaria italica
  source 1..28: mol_type = genomic DNA
acaaaacaacagataggattgaacaaca

SEQ ID NO: 145 - DNA, 68 bp, Setaria italica
  source 1..68: mol_type = genomic DNA
agctgtgcacaaagcaagcgcgctcatagcctgagccctgagctgagcaagctaaggtactgatcggc

SEQ ID NO: 146 - DNA, 71 bp, Setaria italica
  source 1..71: mol_type = genomic DNA
gcaagtcagcagcagcaagcaaacacacagcgttcgtgagctcttccgagcttgcattggtgtaagcaagg

SEQ ID NO: 147 - DNA, 41 bp, Setaria italica
  source 1..41: mol_type = genomic DNA
atcgcaaacacttgaaaaggattgtagtagtgctactagtc

SEQ ID NO: 148 - DNA, 60 bp, Setaria italica
  source 1..60: mol_type = genomic DNA
ccgccacagccatctagctccactccagtcatctagcttcgcttcgcttcccaccacgcc

SEQ ID NO: 149 - DNA, 28 bp, Setaria italica
  source 1..28: mol_type = genomic DNA
gcaaacacaagcgcgtgcgaggggaagg

SEQ ID NO: 150 - DNA, 45 bp, Setaria italica
  source 1..45: mol_type = genomic DNA
cgcgcgctcccgccgcacacaccagaccctccttcctcatcagag

SEQ ID NO: 151 - DNA, 62 bp, Setaria italica
  source 1..62: mol_type = genomic DNA
tcaccaaatttatctcactaacacctccatttttattgtgtgcaagatagtactcgaatacc

SEQ ID NO: 152 - DNA, 56 bp, Setaria italica
  source 1..56: mol_type = genomic DNA
tcaccaaattcatctcactaacacctccatttttattgtgatagtacccgaatacc

SEQ ID NO: 153 - DNA, 61 bp, Setaria italica
  source 1..61: mol_type = genomic DNA
atcatcagcttcgatctcactttgagacacaaaagaaagcttgttgtgagattagagcacg

SEQ ID NO: 154 - DNA, 76 bp, Setaria italica
  source 1..76: mol_type = genomic DNA
caagcacacagcacaaatcaagaccaattagtgctgtagctagtgtgctttggcatcagctgcctgagctcgagag

SEQ ID NO: 155 - DNA, 78 bp, Setaria italica
  source 1..78: mol_type = genomic DNA
aagttacccagcttgcttgcgagtgtgagcagctagctagctagcagagtgatcgagcgttggtgagctgagctggga

SEQ ID NO: 156 - DNA, 79 bp, Setaria italica
  source 1..79: mol_type = genomic DNA
ccagagcacagaagctctcttctctacttgtgagtttcagagcactgtgcaagaagatctgttgggtcacttcgctccc

SEQ ID NO: 157 - DNA, 55 bp, Setaria italica
  source 1..55: mol_type = genomic DNA
acacgatcggcttgagagcaagaggagaaccagcagagctagctagagctcgatc

SEQ ID NO: 158 - DNA, 78 bp, Setaria italica
  source 1..78: mol_type = genomic DNA
cagagcacagaagctctcttctctacttgtgagtttcagagcactgtgcaagaagatctgttgggtcacttcgctccc

SEQ ID NO: 159 - DNA, 76 bp, Setaria italica
  source 1..76: mol_type = genomic DNA
tctcatcactctctctccatccgacgccgaggtcgcgacacacctgagcagggagcgcgtgccagtgccaccaccc

SEQ ID NO: 160 - DNA, 63 bp, Setaria italica
  source 1..63: mol_type = genomic DNA
gcctcttcttctccttcgtaaatacagtactagtaagcgtatactagcactagctagtaagcc

SEQ ID NO: 161 - DNA, 47 bp, Setaria italica
  source 1..47: mol_type = genomic DNA
cgatcaagttaattttgtttctgctttgtgcgcctgtgttccagtaa

SEQ ID NO: 162 - DNA, 67 bp, Setaria italica
  source 1..67: mol_type = genomic DNA
cgatcaagttaattttgtttctgctttgtgcgcctgtgttccagtaattactttccgtgtagcaaaa

SEQ ID NO: 163 - DNA, 26 bp, Setaria italica
  source 1..26: mol_type = genomic DNA
ctctctctcagcagtatacgctgaca

SEQ ID NO: 164 - DNA, 72 bp, Setaria italica
  source 1..72: mol_type = genomic DNA
atcacccatttcattaagacccattagcaactcagaaattgaaaccccactagcagcctcgtagtggcaaca

SEQ ID NO: 165 - DNA, 64 bp, Setaria italica
  source 1..64: mol_type = genomic DNA
aagcaatctcaagcgcagagagccaaagctttcggtgtagctcgaagagcaaagcgaaggcaag

SEQ ID NO: 166 - DNA, 122 bp, Setaria italica
  source 1..122: mol_type = genomic DNA
cacgcccatttcccgtgtgctctggtgcaagccttttcgtttcgcagggcttcttcctcgtgaaagtctctgctcctgcgctcccagggccgcagaactgaagcacggagagagagggcgag

SEQ ID NO: 167 - DNA, 106 bp, Setaria italica
  source 1..106: mol_type = genomic DNA
cacattttggaaagaggagagagagaacgcccagccaaacagccaaggaaacaaaccgcggcgagaggcggaggagagggaggaaggagggcagaggacgagcaag

SEQ ID NO: 168 - DNA, 73 bp, Setaria italica
  source 1..73: mol_type = genomic DNA
gatcgcttcgagaggttcgtcgcttgacccgaagggttcgcccccggttgcttgaggcgagtcggggaggaag

SEQ ID NO: 169 - DNA, 127 bp, Setaria italica
  source 1..127: mol_type = genomic DNA
cgttgccgcaagactcagatcagattccgatccccagttcttccccaatcaccttgtggtctctcgtgtcgcggttcccagggacgcctccggctcgtcgctcgacagcgatctccgccccagcaag

SEQ ID NO: 170 - DNA, 111 bp, Setaria italica
  source 1..111: mol_type = genomic DNA
agatcagattccgatccccagttcttccccaatcaccttgtggtctctcgtgtcgcggttcccagggacgcctccggctcgtcgctcgacagcgatctccgccccagcaag

SEQ ID NO: 171 - DNA, 114 bp, Setaria italica
  source 1..114: mol_type = genomic DNA
aacagccccagctagcaacacctgcagcaccaatcaccattagctttgcaattgcagagctcaattcagctgcgcaacgcctagcaacatccgcaagaagaagcagagctagag

SEQ ID NO: 172 - DNA, 396 bp, Setaria italica
  source 1..396: mol_type = genomic DNA
gtaaggaagccctacctttctatggttgttttttttatttcattctgttctgcggtggatggatctcctgttcgctgcgaatgagcgctccaatccgaatccttgttgttgctggtatgggtgctccgattcgtctatctcgtggcggatttattcgctgcgcggcggagtagtagttggatcagtttgtttcccagtttttttgttaggattatgaagaaaggtttatggggaacggaaggtttacgtgccacaataaactgcagcaagcagcctcactggaagtggtagcttgcctgcagaatttatttgataggattacctttcacgggctaaataagcagattctgattagtaggagtacccttcttatgcttgaatctgttgatgcaacag

SEQ ID NO: 173 - DNA, 103 bp, Setaria italica
  source 1..103: mol_type = genomic DNA
gtgcgtgcccctcatcctcccccttacctgtacacgcctcctcccacttctcgggcgttaatttcaccttccacgctcgctccctctctctctcttcgcttag

SEQ ID NO: 174 - DNA, 552 bp, Setaria italica
  source 1..552: mol_type = genomic DNA
gtaccagctttccctcctctctttggttccgcagggtcccgaggttagggtttgcgagggtaggtttcgggcctcgattcgctcgattgaggccggattttgcacggggacgtcggatccgtgcgtgatctgtaggtttcggttcggattgtcgcgatttcgagagtcaattttgcgtgatttttctggtgggcggatgcggacctagggtttcgttaggtcccgaagtgtttgactcctattcgcgaattcgatagggtttcaggccgcgatattcgagcctgttgcctgatttaatcgttgcatgagcaaaaactttgttatgttgctaactcagtaggaatggcaattcatttgagcccttcatttcggcagttgaacatggccattgcatttggtctgtagttacctccataaggttgttcgtggggcttgtatagcttatatcctttgttgttactcccgaattggtgttttccttttagtcttgtgcagtgactgtttgctactgagtgacataattataattaatttcgttctgtatcctctcag

SEQ ID NO: 175 - DNA, 113 bp, Setaria italica
  source 1..113: mol_type = genomic DNA
gtaagctcactgcagccagagttcatcaaagtctttccttttccttgtccatgaatcctgaattcctgaccatggagctgagctgatgcctcgacatgaatttgtgagcgaag

SEQ ID NO: 176 - DNA, 501 bp, Setaria italica
  source 1..501: mol_type = genomic DNA
cccaggtgaggccccctttctatgccaattctcacacttctgactttttgttcatctcatccttctttgagaattctgtcgaattttggtctatctgtaatgattccagcacacagatagtttatttgagatagcgctgcccttccttctgggtccttgtagtagtagcatcaaaaaaggatattttggagataatcctgaggacgatctttactggatgaaagactgaagcaaaaagctttgagaaactttgttggatgttctgaaaatcttttctttatgagttgatgacacccctgcgttcaaaaccacttgcttaaaaagtggaaaggggcatgatcaaaagatggaaaacaaataccagcatataaaaaagctccagttttgtgaaacaagcatcagggaggataagcatgtgactggccgccgatttacttgcgtagctcacctatttcacagtattcaatttctctgtatttgcccgttgccttgcagtgacac

SEQ ID NO: 177 - DNA, 1003 bp, Setaria italica
  source 1..1003: mol_type = genomic DNA
gtatagattcagttccttgctccgatcccaatctggttgagatgttgctccgatgcgacttgattatgtcatatatctgcggtttgcaccgatctgaagcctagggtttctcgagcgacccagttatttgcaatttgcgatttgctcgtttgttgcgcagcgtagtttatgtttggagtaatcgaggatttgtatgcggcgtcggcgctacctgcttaatcacgccatgtgacgcggttacttgcagaggctgggttctgttatgtcgtgatctaagaatctagattaggctcagtcgttcttgctgtcgactagtttgttttgatatccatgtagtacaagttacttaaaatttaggtccaatatattttgcatgcttttggcctgttattcttgccaacaagttgtcctggtaaaaagtagatgtgaaagtcacgtattgggacaaattgatggtttagtgctatagttctatagttctgtgatacatctatctgattttttttggtctattggtgcctaacttatctgaaaatcatggaacatgaggctagtttgatcatggtttagttcattgtgattaataatgtatgatttagtagctattttggtgatcgtgtcattttatttgtgaatggaatcattgtatgtaaatgaagctagttcaggggttacgatgtagctggctttgtattctaaaggctgctattattcatccatcgatttcacctatatgtaatccagagcttttgatgtgaaatttgtctgatccttcactaggaaggacagaacattgttaatattttggcacatctgtcttattctcatcctttgtttgaacatgttagcctgttcaaacagatactgttgtaatgtcctagttatataggtacatatgtgttctctattgagtttatggacttttgtgtgtgaagttatatttcattttgctcaaaactcatgtttgcaagctttctgacattattctattgttctgaaacag

SEQ ID NO: 178 - DNA, 1002 bp, Setaria italica
  source 1..1002: mol_type = genomic DNA
gtatagattcagttccttgctccgatcccaatctggttgagatgttgctccgatgcgacttgattatgtcatatatctgcggtttgcaccgatytgaagcctagggtttctcgagcgacccagttatttgcaatttgcgatttgctcgtttgttgcgcagcgtagtttatgtttggagtaatcgaggatttgtatgcggcgtcggcgctacctgcttaatcacgccatgtgacgcggttacttgcagaggctgggttctgttatgtcgtgatctaagaatctagattaggctcagtcgttcttgctgtcgactagtttgttttgatatccatgtagtacaagttacttaaaatttaggtccaatatattttgcatgcttttggcctgttattcttgccaacaagttgtcctggtaaaaagtagatgtgaaagtcacgtattgggacaaattgatggtttagtgctatagttctatagttctgtgatacatctatctgattttttttggtctattggtgcctaacttatctgaaaatcatggaacatgaggctagtttgatcatggtttagttcattgtgattaataatgtatgatttagtagctattttggtgatcgtgtcattttatttgtgaatggaatcattgtatgtaaatgaagctagttcaggggttacgatgtagctggctttgtattctaaaggctgctattattcatccatcgatttcacctatatgtaatccagagcttttgatgtgaaatttgtctgatccttcactaggaaggacagaacattgttaatattttggcacatctgtcttattctcatcctttgtttgaacatgttagcctgttcaaacagatactgttgtaatgtcctagttatataggtacatatgtgttctctattgagtttatggacttttgtgtgtgaagttatatttcattttgctcaaaactcatgtttgcaagctttctgacattattctattgttctgaaaag

SEQ ID NO: 179 - DNA, 102 bp, Setaria italica
  source 1..102: mol_type = genomic DNA
ctacaggtattaaaataatactattggcattttctatctctctctcttttttttgctgcattgttttatcattttggttgaatcaatgtataacaggtacct

SEQ ID NO: 180 - DNA, 141 bp, Setaria italica
  source 1..141: mol_type = genomic DNA
cctcaggttatttgcttgtactgcattcgcactcctaatgttaaattttgttggatggggcattatatttttcatatgcccaattcatcattcagtgtattgtgttgctaatactttttctgccaaacctttcaggatatc

SEQ ID NO: 181 - DNA, 555 bp, Setaria italica
  source 1..555: mol_type = genomic DNA
aagcaggtttgatttctagatccactacatgaaccgtgtactgcttttcattggccatttcaatccttatgaaaatatgaactgaatgcgagctatgtggatttatgggcctgaggatattatgcatttcacagttcaacacaactgttgtgaataatttgggttgagtttaatcaaaactagtgcaatacatcaggaatttgtttatagacaatatgagcaactaaaggtgtggtagatctgaactaacggtgaagacaggtgatagtgcatcatgatcaactaaatgccatttgtaaacttcttaatacatttaagcaaaatttagatcaagtgcctaatgatgagccagaagaataagtgcaagcaactaacaatgcattactctgttgagttaattttcttgatccagttaaggtttgccattgagtggaccctcctttccctccttaatctttttgtgaactcgggccgttcctttcctatttagtagagctatataccagtcttaaatattcgtggtcgcttattctgccttgattgctccaggctctc

SEQ ID NO: 182 - DNA, 104 bp, Setaria italica
  source 1..104: mol_type = genomic DNA
atcacggtatctccatcctagcatatttccacttaagtcctttttattttctggagtcatcgtgtatatatattcaaattccatttgcttggctctaggaggac

SEQ ID NO: 183 - DNA, 674 bp, Setaria italica
  source 1..674: mol_type = genomic DNA
ccacaggtatattagaatatacaccattcccttcgtgagatctagcctctttcttatgcgagtctgcggctagatggtgcgatccgtgtacggagcaaccgaggagtgaggtttattgttggatcaactccagatctcttaatattgggatatgataaggggcatagatttcgaacataagttattagcgggcgatttgagtccttatttattgctggtttgtaggtatcgatctgatttccggcctgtgtacaagggccatgaactggtggttggtgaaagtcagtttaagatctgtatatagatgttttgtgtgggggtgacagggatctgagttcttggtgacgattaagtcaaagtttaaggtgtggtcttttttctttgaattttttgtggtctaggttcgtgttattggtggtggaaagtcaagaaagggaaatagattctgatgtccgtgacgtttgagggagggggttcccctctttcttgatggtgcaaaatactgatcttgcaattaatgacatattttatattattggtgttgctgtgaggttgcgatttataatttgtttacatgattggtgttatgtgatatggttgatggctatgtatttgtggcctgcagtggttatctgggtatctgatttatcctcgtgatgaatttgcaggtacct

SEQ ID NO: 184 - DNA, 120 bp, Setaria italica
  source 1..120: mol_type = genomic DNA
gcccaggttagatatctaacgaaaacaaacctaatttttttgtgtacatgttaatggattgatcatatatcttgtaaattgggattgattgttggtgttgcctttgtgttgtaggatctg

SEQ ID NO: 185 - DNA, 1012 bp, Setaria italica
  source 1..1012: mol_type = genomic DNA
aagcaggtctgcttctgctccctctgcctccctttactgtgcatggcatgtgaggtttcactgtatgagataatgtgttctagatttgcattgttggacacttggctgagcacataaatgcttttatcacctttttactttgttgaagacaggatttcctttgtttagtagaatatgatatcaaggaaataatttgtagctgctgatatatgaagtcatagattcatagatgctaacctttcttttaaaagacaatcaaggttgcaaggaaaacacagcaagtctgtgacatatatgctgtcagagtcttttatagccaatcaccggcttttgaatcatagtggtgtatactgaagtaatttgcatggcatgacaaattttgcaagacctgaactgtcggaatactattagcaaggtttagtgctattagcaaaaaagaaaaggcttagtgcatataatctgtgctagtttttgttcatgcgtaatcacggaaacggtacctcttactattaagtgtaacaagttctagtagaggcactgtttactttgaagtggcaacaatgtttcatatctcctcattttatgtttcaagttcgtgttcctgtttcatatttcaccccatttgtttattgcattttccatttatattcttaatctgtgaaatctaagatgcttaactgtctttgctgttggttctccactgaaattgacatgtcttgctgcatacatttctactttatattactaaattacaaccaaatggtgaaaattaacttagttatgctattacaaaactgtttattactgacagatggtctagaatacataaggcaccacatatgcataaccagctgtttctaattctaatttgtggaatttgctatgtttgtccaaaactgagacaatctcaattctcaactacattgcatcgaagtacgcttgatgttatgatatttttacttcacattttatttgctggagttgacttggaatttaatgtctgtaggctgtc

SEQ ID NO: 186 - DNA, 105 bp, Setaria italica
  source 1..105: mol_type = genomic DNA
accaaggtgagtttcctaattgtctttttaatctatttaaccttcttagttctctttgccatggttctcatctgaccttgttctctccttcaacttcaggaggac

SEQ ID NO: 187 - DNA, 1152 bp, Setaria italica
  source 1..1152: mol_type = genomic DNA
cgggaggttagggttcccgatttatccagctttcttttttgattgagaaattaatcttgcgtgctgtcaagagtgctgtcctgcttgatctagttgcgtgttgcgtgttcgtggtacgggagatacgggagtgcggcgggagtgcggcgagttttctccgccttttttcttcttctgttttttttcgggtggcgttctgcgatgcggctagatccgctttgtctcgggtgctggtccgtgggtttgttcgagctcgatccacgagatctgaggcttggagcgcacggggggcgtagatccgcctgatttgggaatagtttgatgcgaggactgaatgctgatcacctcccgggtttccgttcccattttggggttagcaaccgtgcctgttatctgttggaggcttggagcggggacacggatggttgaatgtagaatttctggagtgaagtagcttgttcagatatttgatctggatgtacacgtgccttcacggttagtagtgtattaaagggtagctctatctgttgctgctaggtgttggatgtgatttctcgatttatgtactgttcggtgtgtcggattttgggtcatgtttcacctgtttaaggaattatggttgggtaacctgttgatctggggttttgaatgatgatgaattgctgttgaattaaataattcattaatgataaccttgtcaaggatagatccggttggtccttttcagtgatctgtttggcagtagtttaaataggttagttctgtctgattgcttaatttgatggatttggggatcacaacagaatgaacagatcatattacctgcattgtgtggggtctgttattgcgatttttgaacctgaacgtgggtgctgtaagctagtgttcgattagatggtgctgcttggtgtggctgtattgcttttttgagaatggtgtggctttattgctggttcaatcaggtttgtatgaccctttcatatttctcagaaatgttattaataagcttgctcttaccaaacatggaggggcttaatggcttaagtcgagtttagtggccagccatgtacctttaccatgtagtcattttagttgatatcttgtacctttttgaggcaatggcttatcagttcccttttgttgcaggaagtt

SEQ ID NO: 188 - DNA, 122 bp, Setaria italica
  source 1..122: mol_type = genomic DNA
tcacaggttgggaaggatgcaatgcaatattatgatgtgcaatcatatctgtataactataatctgaagaaaccaaccagattccttaaccttcctgttcttcttaactatggcaggtatct

SEQ ID NO: 189 - DNA, 163 bp, Setaria italica
  source 1..163: mol_type = genomic DNA
cctcaggtttgttcattttttctgttctgataatatgacaactgtctctattcatctagtataggatgacaagttcatttctttgaatgcttagttgcttactgttagtctttacactgttttcttatgaagttttattctgctatgtattgtgtaggacatc

SEQ ID NO: 190 - DNA, 682 bp, Setaria italica
  source 1..682: mol_type = genomic DNA
aagcaggttggaatcacatctacttttctactacatacattcgttttactgtgtttagggtgggttgttcgtgcatttgagcttgggcagaaaaaatatatccaaaagtgccttttaactgtaaattttaggatccttgtcctaattgttgagtatatcaggagctttctattgcttctcatacagcaaactaaacacttgtaggttcatgttgcaatttgactactagatatcttgatcactgtgtatcagatcagatagtttctgattagtaatgctacctctgatatgatgatagttctggtaatgctaccactgatatgatgagcttttgatcttccatgtttgcacatatctaaacaggcttgcttgtagtggttttgtgccattctgccctgttattgctagactcttgcttgttattatcctccttgttaaaagaattcttaatgttctactggattgtggtgatacttgtaatatctggcacctacattatcaaggtgataataatgctgtgtgttttacagttttgagtatctaatgccacttaattaatttgtggtaactgggaggcatttgagtcggttgcctgatcatttaactttttaattgtgacttagtccttatgccattgaaactttgataactgataacgattggctaatctttgcaggcgttc

SEQ ID NO: 191 - DNA, 105 bp, Setaria italica
  source 1..105: mol_type = genomic DNA
ctcacggtaatttcttctcccaaaataaacctaatctttaatctgttgcctgtctactcttcctatctgttgctaaaaatttgaatttggtatgtgcaggaggac

SEQ ID NO: 192 - DNA, 1370 bp, Setaria italica
  source 1..1370: mol_type = genomic DNA
caggaggttagggttaccgatttgcctgtcccttctctcgagaaattaatcctgcgtgctgtcctgctgcttgatctcgttgtgcttcgtgttcgtggtacgctagatgcgtgggagtgccgcgaattttattcgatttttttgggggcgatgttctggcatgcggctagatccgctcgtctcgggcgttactgggtgggtttgcttggtctcgatctgcgagatctgaggcggggcgcgtagatccgtccgatttggcagtagtttggtgtgaggaccgaggaccttttgggttccccttctgtggtgagcggcttgtgtatgttggagggagtaaacggaggggatggaatgtggaatttctttagtcgaatgcgttcgtttatctgaatggttagcgtatacctggatatttgatctggatgcaggcgtactctgcaactagggtatctaagggtagtgcggtttgttgcagggaggtgttggggttgaattttctgttgatgaactattatgtgtgggattcgctagggatacaaaacctgttggtctgtgctgaaaatgtggtaggattaaatcattagatatctctgtggttagatctggctggcccatttcagtgatctgttagtctgtgatgtaaatagttcgtgtatgacttggatatgacatggattcttttaggtggtgtttggttggctcaaatgtaacgcaattcgattaccgaatgtaatgaatcacgttacagatgtttggttgtggtggtttgtaatcaattgacgctaattgaatcccttgcctatacaatacctatacaagcttgttacccctcctcccccactgtaattaacacccacgccgtaatctgattacgttactagagtgcaaccaaacaaagagggtaatcacccattccgccaccgaatacactaatctgattccctttgcgtttatgttaccttagcacgaaccaaacactatcttagtctcttgcatcatatcataatgtgttgacggtttgtttgattcaaatggatttggtattgtggaattatattgattattagtttgcttggagtcatatattactattttgaaccgcggattttttgtgctagcaccttgtgttagattagctgatgcctccttgtgtgactgtttgtcactggttgaatcagatttgtgtgaccctatcttgttgcttagaaatgtttagtcacattcttattttagcaaacatgagtgaaatgaatgacttgttgatttttatggccagcatgcacattttctgtatacctgagtaattttgtttagtttctactggcttttggcagcgactttatcagtttattttgttgttacaggaagcc

SEQ ID NO: 193 - DNA, 117 bp, Setaria italica
  source 1..117: mol_type = genomic DNA
ccacaggttaggaagggtgcaacgcaatattacaatatgtatttgaatatgtataagctgaagtgtaagcaatcagatttgataaccttcttttctttgacactatcgcaggtatct

SEQ ID NO: 194 - DNA, 142 bp, Setaria italica
  source 1..142: mol_type = genomic DNA
cctcaggtatgttcattttgctgctgggatgatagagtggtcactatattttcatgtcataaaagatgcccagttcatttgagtgcctagcgacactcttttcttagcaaactctaatctgctatgtaatgtgtaggatatc

SEQ ID NO: 195 - DNA, 601 bp, Setaria italica
  source 1..601: mol_type = genomic DNA
aagcaggttggtatcacatctaccattctgttacatccattttgctctgtttatggtgcagactgtttgtggtgcactggaacctgaactcaagaatggaaccaaaagtacccttttaactgaaaattgtaggttccttattgtccttggctgtttagtataactggaggtcttgattgctcgtcatatgctagaaccttttctctttttcacagttaggttcgtcaactaaaccatcttgaacccaatgtatcagatcagataatttctgattagtaatgttaatttttagttttcatatgatagcttgccctcttagctagctacatactacaattgaatttgcatgcttttagtgattgtgtcattctgtattctgctgtcattgctggactgattatcattggctctgttctgtgggattatgatgagacttgttgtatctggtgctcacattatcaaatgataatgattgtaactacaattcgtttactttgtccaagtaattggctgtcttgtgtgggttaccttaccagttaccagcttaagtctgtcattgcaagataattgatgctgatctactaatcctcttcaggcattc

SEQ ID NO: 196 - DNA, 99 bp, Setaria italica
  source 1..99: mol_type = genomic DNA
ctcacggtatttccttcccttccaagcttcatcatttgtcgcttatcgtctgctcaccttgaggtgctaaaaatcttaaattgctctctgcaggaggac

SEQ ID NO: 197 - DNA, 107 bp, Setaria italica
  source 1..107: mol_type = genomic DNA
tcacaggttaggaagtgggatgctatgttgtcttgtgtagttgaatccatatagtttgcaattacaacactaactgttcactttctatttttttattaaaggtacct

SEQ ID NO: 198 - DNA, 164 bp, Setaria italica
  source 1..164: mol_type = genomic DNA
cctcaggttggtccatgttgtcacttccataacctgcttgcatttgattgttatttctgtgatagtattcttccatcatttccaagtgaccattgtttttcacttgttgactactggactgatatactcttaatgtgacttgccatgcaaatgtataggatatc

SEQ ID NO: 199 - DNA, 522 bp, Setaria italica
  source 1..522: mol_type = genomic DNA
aagcaggtaggtattgcatttatctttcgatttgtcgtacaagtttctgagttgttattatcttgtttcatttgtttgaatctagtctggaataaaacatgcaaaattgcacttgttatgtcttccatagttcatcagaacagatggctcatgttggctttagtttgagttggattgtgatgtcctgtttgagtgcaacagttgtgcatcttgtctatggtgacataattacatattgcatgttcggtacagtgcttgttcttcatacgttggtatgataggcatttggcgcttatttgctacgcatactaatctaggaagcagtaaaaaccttgctagcagtagtagtagttctcttcatcatacatttcttaatattgttttttctataatgagctatcgagctagaagaattgcatagtattttcccctgattgagaagactgaattagtagaacagtttattttctaggtgttacaaatgcatgatacaacatgacatactattctttgcaggcattc

SEQ ID NO: 200 - DNA, 127 bp, Setaria italica
  source 1..127: mol_type = genomic DNA
ctcacggtatctccgcactgccaaacttgagcttgtctaaatgaatgattgatgcctactcctggagtatggtgctgaggagtataaatctggatgtataatatgaatttctcggtggcaggaggac

SEQ ID NO: 201 - DNA, 818 bp, Setaria italica
  source 1..818: mol_type = genomic DNA
cccgaggtacagtccagattcccgtctatcgatagttggaatgtcaccatctagatcaacttgctctgttttttcccctattttcttggtagcttgtagcgcagatgtgcgttatcacttatcaggttggtttaggtagatggtttcctgcccgtatttgtttcagcccccggactctgatttagccgagttgcatgaaggattcataaatattgctggaatctgaatgaatatgactgactggctgactgctccctagatacctgtagcttgtcaaagaaagaaactgaaaaacaattcggcatgtggaattagctgacgtgctacattacacaattctgcagcttttggtgagataggtggctgatcttactgcatggtgattccatttatgttaataccgttttatattttttaggatgatagtggctcaaagtctttttccttactttggatcatttgcaattgttgacagtagggtgcatttcgtttctatggatgctacattcatttatggtaatactgtttaataattttgaggaattcatttgatcacatgtagatttttaggatgatagtggctcaaaatcgttctccttacttttggatcatttgtaattgtcaaagtagagctgcaaaaacatgtgtttgctgctatttgaatgtttaattcatcaatcagtaatttatgcaggctagtattttctgaagagttacaacgtgatgtgtattttgataagaggacaatttcatagttgataaatgccttcaaagctcttttggttcagaggttaactttggttgaactttaggtcacg

SEQ ID NO: 202 - DNA, 84 bp, Setaria italica
  source 1..84: mol_type = genomic DNA
ccccaggttagaccctttgaattgctcagttgtctgtttactctttgaaattctagagtctaattttccgtgctgcaggcattc

SEQ ID NO: 203 - DNA, 103 bp, Setaria italica
  source 1..103: mol_type = genomic DNA
tagcaggtgtgtatcttctgccttgcttatgtttttgaactttgggtgcatttggtgtaatctaatttgaataaattcttttcattgttttgtgcaggcagac

SEQ ID NO: 204 - DNA, 1166 bp, Setaria italica
  source 1..1166: mol_type = genomic DNA
cggaaggtgcgaaaatgatctacagttttgcatttacataatatacttcttgaagcatatgtcatatgtgctatgcccagtagcttcaatatttttaaagctcttgtcctgagaactggattgctcaaaactattggaaacaaatctgacaagtgacaagctgcttgtttgtgttgagtgttggttgttgtagctttaacaacaaactgcttaacatatatgagtcttcctctaaagagagctattactcctagatttaaacttgtgagttttagacttggatgcatgaatcaaggacatagatgaaaatgagtttgttaccctacagttattcccttgtaggaaaagatactttatttatttatgacagtgatagcattcattcagcaagggcgtaaggtgtgaaaaagagagagaaaatgtgtctaaaagctttatgacttatatttagagaaaagttgagaagatctaccataaaggcaattggtgggaatagtaacttttagttgattggctgtacaccttccttgtggaagatagaaaacggtactcaatttacattatcctcataatgaacatgttgactagaaaaatgactgtatttgaaatgtagatggataaaatttactcagacctgtgcagtctgggacactagtgcttggttagtttgctgggtttttttccacgtatgatagatcatctgtagctcttctgcaattaagtcatattttggacatagtgagcacatttgtatctgtattactcaatgtgtataggatttccctgataatagatactgggaattgagtaaaattgttttattttttcaaaatacatcaagcatgtattttgttctaaaacatgacctttggtgagtgattaggcatgcatatttatttgaaaccttgtttattgtattatgggcatttgtaggaactgaacctgaagggcattttattttatttagcaccttgctagtttttaagagatgtttttatttatttagtccagagtttctactaatccttaggcttcaagttggtatgtagcattataaatgattgagaatgattactttttacagttgtattgttatatttcctgttaatgcttgatcagctgtcatgacttcatttttactctgtgctaatttgatttaggatctt

SEQ ID NO: 205 - DNA, 111 bp, Setaria italica
  source 1..111: mol_type = genomic DNA
ccgcaggtacacgggctgactcctcacatcgccgccgccgccataggcgttgcctggagatcttccccggccacgctctgatgctgttcgccgcgtgttttgcaggcgttc

SEQ ID NO: 206 - DNA, 107 bp, Setaria italica
  source 1..107: mol_type = genomic DNA
cgcctggtgagtgaccacgttgctttgcctttggttaactttcactggagtggtcggcgatgttgttgttgctgatgttatagtgctgtggttgcagccaggtggac

SEQ ID NO: 207 - DNA, 1703 bp, Setaria italica
  source 1..1703: mol_type = genomic DNA
cgcaaggtccgtgaattctggcctcgccaccattttgtacttttgctgctttgattgctttgtgaatgttagcggacgggtggaaaggtgatgttttaagcatcagttagttgcacggaatgtagtcagactactaggtaggcttccacctagtgatggttagggataatgagaataagaatacactttagagtcatcatttagtctgacttgattgctccctagcataggaatgcaggctgtgctgttagttatgaaggatttcctaattgtatgctgtcataattcatagattggatgcatctgcaagcaaatatattctggcttctcgattgctgtattttgctgattggttgtaatgcagttacctttgtatctgtgtttgcaaatggctgtagataaaccatgtaaaagtgaacaattgatgttggttgtttcacttatgaaactggtaaacatgtgtccggatattccaaatgttgccccccataagaaggctgcaggtccatttgttcttatggccttgtcatgcacatattgtctcatgctgttgttcccatgtttgtttcccagttctgttcaccacaaccttatagtgatccttaaattatgaatcagtacagctgactcaggatggcaacggggcggtgcggggccggggggacactccccgtccccaccccgatccctgatctctgatccccgccccgtccctgaaacctcaatcgggggaacagtttgccctgtccccgcccccgttggatccccgcaccccgtcggagccctgtggggatgagcagccagtattacattcgagcaaatcaggcaaaatgtggcagataagttaacaacaagcaaatccatgagataagttcctaacaagattactagaagcttgcatgctgcagctgtgctccacgaggcagcaaaatgccaacacgtacacaacagacaacactctaattcaatgtggcagacttgcacgagaacgacgggaacagcggtagcggcgctggctgttggaatgcctacagctgaccatgaaggcacaaacaatgcttagagaagttggtcagccgcgcacagatgttgaaagcttgcccttcgccagcacggcgacacctccgcgaggaagagacggcgcatccagcgtctggtccttgcggccaggtggcctcgccttgcgttgtgcttgtcgacttgccgctcgtggcctcgtgcctggtgacggcgaaagtgaggtgagaactcaggagcgagatgaatgaatggagagtgctgggtggcggcggtcgtcctctgtgactgattagggttcgcggaaggccggaaggttggagttttatatatgtacgttggtgtattaagctgttgggctgctattttagatgggccacaagcattcgtgggtccccatggtgccccgcggggagaaaatcacccccgcccccgccccgataatgtttcgggtccccgcctcgcttcccccgcgaggggaaatttgtccccgtcactgccctgttcgggtttggtctccgtggggatctggccccgcggggggaattgccatccctacagctgacaatttacaaccacttaggacacgctagctatgatattatggttggtatgaaagatatcttgatgaacatataaaagtgataagtagttaacatggagttaaacttttcatgcaggatctg

SEQ ID NO: 208 - DNA, 159 bp, Setaria italica
  source 1..159: mol_type = genomic DNA
cctcaggtgagcagagctccaatccctctcctatcttctcccgtctcgtcgcttcatctggctgttttcttatcttggaactgatgctctgtgtgtgtgattggggatgcttctccggtgtctgatgtatttgcgctcgttgatgcctcgcaggctctc

SEQ ID NO: 209 - DNA, 92 bp, Setaria italica
  source 1..92: mol_type = genomic DNA
cgctaggtaagccgccggtatcttcctataatcacttgtgagatttagttgcctgtggtgtgaccttcggtggtgatgctttgcaggcagac

SEQ ID NO: 210 - DNA, 564 bp, Setaria italica
  source 1..564: mol_type = genomic DNA
cgcaaggtgaatttcgcttgttttgttgtgctattgtggtgcatagcttgtaatgttcagttactgactatgcttgaataattttaatgggcctagagatcgtgcatgaggttacttgcatcataagtagtagatgtatcattagtaaggaatgcggcactgaatataccatcatcatgcatggcttgaattttgaacagttcagttacagtatatcctttttaatccatcgagtatctgaattgagtgacagatgaagaatcaatgctgtttgtgtaggctatattatcatccagtaattgtttgagtactccttcctagaaatttgcagaatttcttcttggcccgggttatcttttcagtgcttgtgatgttaatacatgttactttagtatttgctttgtgttttgagttgttattccatacgtcgattttggtgccatggcatatagagtggaaacttttggctaagtgatactgtttggtgtgctcctctataattgtatacaggtttccaataattgaacataatttgatcattctttttgcttgacttaggacgtt

SEQ ID NO: 211 - DNA, 142 bp, Setaria italica
  source 1..142: mol_type = genomic DNA
caccaggtagcgagccatccgcctgtcctctcctcttctgctgctgatccgctttcaaatccccgttggatttgttccgcggtgttgacatcaccgcctcgcctcatctttgccgcgtttgttttcctgtctacaggtggac

SEQ ID NO: 212 - DNA, 286 bp, Setaria italica
  source 1..286: mol_type = genomic DNA
catcaggtacctacccaccaccaatctttgtgcccccgttcttcctctccagttttttcttgttggatcgtccatttgtcacttgatcaccctggatcttcttggatcatgattgaaattattaatattcagtatcacccttgtccgtcacttctgaattccatctgtcgcttctgatagagtgatagttgctgttcagttgccccgttagtcttgcacacaccacatccacttcatctctgacacactgtactcattttgactgcgctctgctttgcaggaagtt

SEQ ID NO: 213 - DNA, 747 bp, Setaria italica
  source 1..747: mol_type = genomic DNA
caggaggtacttatgatgatgctgttcttccatccttttccttgagcaaaatgtcgttgctattggattgtgattctcaaactgtggtagaaccttcttagcatgcagttgactattgtgaaatgagactgaccatcttactgcattttgatatccagatacatgctacaaaacatgtacattgtttgaaatttgatcccaaacctttgaactgaatatatgctgtcttctctgtacaaagttttttttagattggttgtgatgttgtgttgtcttctgtgtgcaggctgagaagatcggtcttgattacatggatgttgaagctcttaaaaagatgaacaagaacaagaagcttgtcaagaagcttgccaagaagtaccatgctttcttagcctccgaggctattatcaagcagattcctcgtctccttggtcctggtctcaacaaggcaggtaagtattctgctctgtcaacatctggctgtcatccttcatagttagaaatgagctttatctgttcttaccgcaatctgtgttgtacattcctactattgtagttatatctaatatgtaatggctctggtactgttctgtggaaaggtatttatcagcctcattttgttactatgttttcagtttcatgtgtggcattcccttagcctatacatatacgaagatataacttatttttgtacagcttagctgtatctgcaagattttgaagcttgttggctttttgcaggtccac

SEQ ID NO: 214 - DNA, 104 bp, Setaria italica
  source 1..104: mol_type = genomic DNA
tcccaggcgatgagaatgtagtgtctcatatcagaatcgcatttgacttgctggtgttgattatggttatcgatcgttttgttttcatgtcatcacaggcaagt

SEQ ID NO: 215 - DNA, 152 bp, Setaria italica
  source 1..152: mol_type = genomic DNA
cagaaggtgagtcatgcatgcttttaaccctaccttgttttaccttttctttctgttgcatcttgtgtgtccactgaatacgtgtcagagcaaacaactgatgttaatccgaagctaactcaggcctgtgattttttgttttgcaggtgagg

SEQ ID NO: 216 - DNA, 440 bp, Setaria italica
  source 1..440: mol_type = genomic DNA
cagaaggtgtttattcctgaaatcccattttcgcatctcattcttagctaaattctgattttctgagtcatttagggaggggtattttcctgcaatcgcagttatgatttggtattagcttccatttagttaattacctcctggcgaaacacatgtttctaaaggcagaataagatagctagtggtttaacttttaagttaactatactgatatacatgcaatttgtcattgctgcatcttatatttagttcacattgacaacagactgaaactacaccactcatctgtcttgcattttagcaatctgcacctcatgacgcaaaataattttacttgctatagctgtgcttcactcatggtattcatcccttcaagacaattttttttgggaattgtgctcatttcgaattatatggttcttttcttgttccaggaagtg

SEQ ID NO: 217 - DNA, 536 bp, Setaria italica
  source 1..536: mol_type = genomic DNA
caggaggtaggtacctattgcatcctcatccrttccgtctgtctggagcttgttatctgttttcccgttacaattggttaccaaatcgactgtggtggatgccttgccatctccttattgatcaaagaatcgcttatagcattgccatatgcttagcagcttagacgatgcatgtcgtttggtgcttgtcctcttacaagcacaagggccactcgttttctgtcgcactgtagatcataggaaaactaatggaccattgtttggcaaagccatttgctcccaccagaaattgtggctttgcttccaccagaaaatggcattgtctatttcatgagtgttgtcccattggtagcctcagaggttaacttgtcaagaaacaactaaccattgtagtaactgatcatactgatatcatagtaagacattgacaagaaattgttcgtcattgaacatgagctgaacgaaatagattagcttctgtccctttcatcatttgttccagcattcatgaatattgttggttgttgtaggttggg

SEQ ID NO: 218 - DNA, 587 bp, Setaria italica
  source 1..587: mol_type = genomic DNA
attcaggtacgggtgctgataaaaaactaatcttccatgtctttactgtaatagaggtcgatcagactgcggatacgcctcttccgcgggggaaatcgagtgtttcttcacttgatttgtgccgttcttggccgtcctgttagcctttccggttggatttgacgcagaggtggagagtagtgttggatcggatttttgggggaactgaagttttgggtgctcttgggaggcatgggaaagtttttttttttatgcgtggtggttggggaagtacggtgatcggctttttagttccataagaatttttcctttttatgcagaccattatctagaacatgtgggtgataaagattctagatttgctattttttttagcgtgagttggattgctagactactacgcttacaagtttttgagtagttggtgaacggtgtataacttgttcacatttgtgtagctgaactgctattgttgcagagcataaaattgttcaccttttagttctgctatagaaatggttttataactggtaaattttatggtgcttttagctgatccagttaagcttacccttttgcaggattgc

SEQ ID NO: 219 - DNA, 101 bp, Setaria italica
  source 1..101: mol_type = genomic DNA
cactgggtatgtcatttggctcatcttttttgttgaaccatgcatctacttcctgctgttccaggttctcatgctgtgctgcattcactatacaggaaggc

SEQ ID NO: 220 - DNA, 126 bp, Setaria italica
  source 1..126: mol_type = genomic DNA
acagcggtaagtttcacgtcttagcaaaaaattcgaggaacttttgcgatgtcttcttgcgttatttgcgttttttatgctactgattttttttatcattggttttcttgtgttgtgcaggtctgc

SEQ ID NO: 221 - DNA, 3284 bp, Setaria italica
  source 1..3284: mol_type = genomic DNA
acgctggtaagtgtttctacgtttgagccttttttgtgcactacctggtatctttgggtgcttagatttgatgtgctagatgcgtttaattagctaacttggattagcgaggttgttagcttgtagtttggacttggtgtggtgtggcaagttattttcttgtaaattaattacgttcatgggcttctgtgggctgtagaagctacagcaaggattttttttttatctgtctcgagttcagataaaatttgggcgcaaaattatcccactttgcatgctttccttctcgcagaggatgggggtgctcccatttgaatgttagagattgaattcatttgcatccttgttgtagttaggaaaatgatgattgcctgtagaatggcttgtcttatacaaaccatgcatgagcttattgacttggggacttagacatctttcattacattcttattgagatggtatgataagattggtgttgtcatgtactccctccgttccaaattataggtcgtttggacttttttagattcatatattttgctatgcacttagatatacactacgtgtatatgcatagcacaagctatgtatctagaaaagctaaaacaaactataatttgggacagaggaagtagcaaacacctcccagcagttctttgatgtactaaatttgtgtactgcctagctattaattgaagacttgtggtcaattctttcccaattcgtttaaggattccacatatctccagctgtgatttgcatagtggttttctttcaacatgatttggtgtattgatttgctgcatgctaattaattagaaatttttcagacagaaggcatagctgcctttaagctgagctgagaaattgtatcttggatattattttactgccctcgatggtttccaccaatcagagcgcctttgtcaggggaagaaatatccatgacaacttcctgtttgtccaacaaatggtgaaatccttgcacatgaagagagaggctcatattctcctcaagctggatatttctaaagcattcgactcggtttcatggtcctttctcctggaggttatgaggcagttgggttttggacagagatggcgggacatgttatgtctaatcttgtcgacctcgtccactcgtgtgttagtgaatggggagccaggggaatctattcttcatagccgaggtcttcgttagggtgatccactctctcccatgctcttcatactggtcatggacgtcctaaattctctcatggagtacgcggctagagagagattgcttcagccacttgctgttcagcaagctcggcatcgggtctccttttttgctgatgatgctgtgattttcctaaggcccgggaggactgatctgcaagtaatcagaagcatccttgacctgtttggacacacttccggcctccacactaatctggtgaaaagttctgtttctcccatacactgttcagaggaagagatgcttatcactgctgaagtcttgtcgtgtgctgtaaaggaactcccatgcatgtatcttggtttgcctctttctattcataagcccaccagagaagtgctcttgcctttgattgacaaagtagctgatcatttgcctgggtggaaagcatccctgatgaacagagcaggtcggttggtaatggttaggatggttttatccgccactcccatttattccttgatagctcttgatttgccaaattgggtgtttaaaaccatggataaaaggaggagaggtttcttttggaaaggtcaggacaagccaatgttggtaactgcctagggtcctgggaaagagttcagcggccccgggaaaatggagggatggggaattcataatcctggaactctttggttgggcattggcgtattcgaatgttgggaattcagaaaactgaattcctttccggccttgggctggattccaaattcaagcttcctcattatgccccagcctgtttaaggtagcagtcgaccatattggtggcaaatggtgttttcactcttttctggaaaagataggtggggtaattggtcacactatcgaggagttggctcccaacctgttcaaggccatccccaaaagggcaattagaagacagacagtagcccaagctcttgttaatcgaagctggttggcagacatcaaaggcgcacttacagttcaggttttattggaatatctccagatttgggaccatgttgagggagttgtcctgcagcaagatgttccagatcagctcagatggaaactcacacagaatggcgtatacagcagcaagtcagcctatgctgccttctttgttggaaccattaaatttgctccttggaggaggatttggaagagtttcgccccttcgttgcaaattcttcatttggttagccatcaacaatagatgttggacagcggaccgtcttgccaaacgaggattgcctcaccctgaggtctgtcctttttgtgatcaagaggaggaaaccattcagcatctgttagtcggctgtgtatttacaaggcagatttggaccttgatcctccaacctctacaactgacagccctgataccctcaccttctgaggctcgtttttctttttggtggaggaaggcattgcgctcagtacctaaggagataaggaaagggcttaactcgctaattatcctggtttcctgggagatttggaaacacaggaattcatgtgtttttgagaatgctaggccaagcacctctttgctgctccagacagttggcagatgagtgtagcgtttggggcatggctggggcaactaaacttcaggaactcctagtgaggtcgctggccccaccagcctaggtcaaggggtttttggtcgaggtcatgcttgttgtcgtctgtaagcttcgctgtgtaggtgtgtgggggtgtgtttcagtgctcgggttttggtccttaaccggacttgttgtgctctcttttctctcttaatgaaatgacacacagctctcctgcgtcgttcgagaaaaaaacacatatgtatttggcaattccacactttgaaatcagttcacaccaattgtcggactttaggtaacttattatagagtacggattaccgagtcagctcatacgtgtttgaatgagctaccatttaacttgtatgattgtctagtttgatcctacaacttgtattggttgttttaatttcttcattcccatttgttctcgtgacaggtttttgttggtatatacaagtttatagcctaccttttgtgttgtataggtactg

SEQ ID NO: 222 - DNA, 149 bp, Setaria italica
  source 1..149: mol_type = genomic DNA
aaccaggtaagaacttggcccgccgcctcgcagatttgcttccgaatttagcatctcgggttcttgatttcgtatttgttttgcttgctgagatctggggggatcgaggctaattctcggatcttgtttggggtttgttgcaggggtag

SEQ ID NO: 223 - DNA, 1415 bp, Setaria italica
  source 1..1415: mol_type = genomic DNA
cgcaaggtatatatgcgcttcgatctgggttcgagtactctagtcctgcgattatatctagatgcgcgtggttgtgtggttgaactggctgaagtggtatcctgtcatactatatgatgtcttgatggggataaatgctgttactgttatctctggacggttgacccttgtctctggggatggaatttgtggattggatgctagataactgatgattattcagatggtgggcatcatgtctggggattgaatttgtagatttggatgctagatatttgatgattagtgattgcttagaggaaggtggaaatcatggttgatgagaaacgcgatgcacgtgtgaagggtgccatctggagttagtatgttctgttgaatcttctttgcagagctgcagtttgttatggttaaatttggtttgcttcagtgggggatggtctgtagattgcacccagttcaaattagtagttgaatccgtagagaaaaatggatgttatttttccccttattaaggggaaatctagtttgacatgtacagtgactaactcttggcaaaagctagccaaatataatgtacatgggaactcattctttacacttggttgtcagcaggtctgtaccctcaacagcaattgaggcagtttgccctcaccaataagtttgattttgatcatctatacagtaatctagacaaacgggaagttacttcatgcacagcctgtttgtttaagtccattacaaagagtagcttttggcccatttgtcacccgagtgataaccacgccttgtcctaaacaactatgcttgctcagaatatgcttaacatttttggtagtcaatcttgggcatagtggtaaacatgactttattagggagtttattcatgaagttgaaaaggttagcttggaacaaaaggtaacttgcattcattcctacttctcattggacagggggtggaatttgcctccacattggatatatgacattgcactttgtgattaaaatgttgccatgagtaggatggagatcttatacttacattttataattttctttgggagatctatacctgggttagaatggacaaattgcttcgtacagatatactgatccatttggtgacaagtctaaagctgccaaagcttttcccagtctagttagcttgttgtacactattttagtggttcactgcattcttataaggtgatgataaaatccatgtccttctatgttccctactgtctttttttatattatcgagtctttgatgggttcagtgatatcagcaatgcaatgatgaagttgtccaaaactatttggcatttcccatgctcttaagtagcatcatagttttgtcgggattttgtttcatttatcaaacatggttgataaataaagttatgctgcaggtggtg

SEQ ID NO: 224 - DNA, 93 bp, Setaria italica
  source 1..93: mol_type = genomic DNA
cgtgaggtaagttaaaatatctccgcctgtttaactacctttctatgatttacttcataattgactcactgtttcaactcctcttaggtgccg

SEQ ID NO: 225 - DNA, 97 bp, Setaria italica
  source 1..97: mol_type = genomic DNA
cgattggtatgttcttccaatcagccgaagtacctctcttttcggttaaatgttagatttgatatttatcagttatctcaattactttcaggtgagc

SEQ ID NO: 226 - DNA, 593 bp, Setaria italica
  source 1..593: mol_type = genomic DNA
cgtcaggtattttgagaaactctccatcgtagttacctatttctacctacctatttctacctcaacgtttttttttctggaaaatagtaaaccattttacaatcattgtgtatgtttcagtcaatcgttatgtatatttcaatctatctcgtaatatatcagtctattttggtagccctcttccatagaatcttgttaatagattttgcatgaaagcagtagaatgtaagaccttatagaacaagaggtggatttcacatactctttatttttcttgcaaggatccaacttggttgccatgtggtattaaaaaatatttaaagtatgcatggcctcaatgtttgccaggctagtatgattgacatgagtttatttataatgttctgtgaccacatcagttcttccatgctcatgtttgactttgtgctgtttctatttgaatgctcctgcgcatatctactgaaaagttgcgtttatttgaatttttgtcattgcactcttgcatgcctgttctgtgattttaacaaatgttgaaatattttatcatgttctaagattgtccaaaaatgcttactccatctaatcaggtcaag

SEQ ID NO: 227 - DNA, 171 bp, Setaria italica
  source 1..171: mol_type = genomic DNA
tcctcggtgagcggccgcccccgctctctctctctctctctctctctctccccccccccccccccccccctctctctttctaaattctaacaccgtcgatccaatccggcgagctgggaaccaaggggttctgatctgtgggagtctgtctgttttcggtggcaggttctt

SEQ ID NO: 228 - DNA, 765 bp, Setaria italica
  source 1..765: mol_type = genomic DNA
cgcaaggtacagatccctgtttcccgcctcagcctatttcgttagattcagtggattttggcgatgtccccttacgagcggtgtgctgagctgtctagcctttagtagaccgtaacgcgagaagttgctggtcgaatacctttttgtgctggttagtctgtggcatgtgctgttgtggtggatatctggtcaatcgtacctattgtgtgtgcttatgcattttcgtgccttttaattgtggcgatagcaggtcctgtggcggttcatagattgcttcctgacccttagttacgcagtactgtgattacataaattattcattctctgaaatgccagcttctactgtgatgttcttttgtccctgctctgcattgaagatcttttagtacactattctaatatctagtaccaactgcttgcatttgtgtgaagttcctgtatatcatattattatgtcgagtttatattccattgtatattggttgcgaaatgtgtaattgccatctaactcctatggtttctttcactgtactttgtttcactttattattgatgtaattcacgtgctaatttaggtgttgactggtcttgttgtggaagtctcttaattatgaatcaaagttattgctttaaatcccatttgcattccttcaatggccctggaaatgccattctttagattttgtggcatcttgatggcttgattgttgcagccaaatgatggtgtttactgtcttactctttccctcttcattgcaggttgtt

SEQ ID NO: 229 - DNA, 98 bp, Setaria italica
  source 1..98: mol_type = genomic DNA
cgtgatgtaagtagccagtgtgcaccatgttctgtcttgtttcttccttcctgccatgcaatgtgtttgactgtcttttctttaccctgtaggtgccc

SEQ ID NO: 230 - DNA, 99 bp, Setaria italica
  source 1..99: mol_type = genomic DNA
cgattggtatgcttcttccaactcttctagtttcctgaaaatctgttcgtaatgattgcttaagtatctgtacatgttcgatccataatgcaggtcagc

SEQ ID NO: 231 - DNA, 102 bp, Setaria italica
  source 1..102: mol_type = genomic DNA
tcccaggttagagctcaatcataatttgtggtctgcttgagctttgtgccaaacaactcttcagatctcttaactccttttctttggtaagcacaggtcacg

SEQ ID NO: 232 - DNA, 137 bp, Setaria italica
  source 1..137: mol_type = genomic DNA
ccgccggtgagcatcagcttttttccttgattcagatctcttggtgaaattcgccaactctctacttttttgtttcttctctaatattcctgtgctctgcttcttgctgctgctgttcttgtgtttaccaggactcc

SEQ ID NO: 233 - DNA, 1014 bp, Setaria italica
  source 1..1014: mol_type = genomic DNA
cgcaaggtacggtaccggtgcatccccctctcgcttgttacgacccataaagaattaatggcaacacaaatctcctattgtttgttgatttagaggtgtcgcggacaaactgctttgatatctattttgttttcccgtactgatttgtgcgctctgaaacttgcggttacttgcggattcagaggcgtcccaagtgtgagacggatccagtagattcacccgcaagacgactttgcagtgtagtagaaagctttgatctttcgatgcgctttgtatagtttcagtcttggtcatgatttgtatctgaattacgtgatctttggggctgcttaggcatctgcggctccccctgttgtggttctggatgtcttcctttgatctgtctagatttttttttttgtttaatgatgaatggttcaaccacaaattaaccctgggctgtcaacaagatacctgtcttgaccgtcaatgaatatgtttcagttacatatttgtaatactgcaaaaaaatccagcaaggttctttggagaaagcggagagttcatatcttttttgcaagaatttaatgctccttgcactgtttattctgcagttctgaacgacatgtttagatctgcaatgctggttaaactaggactatttccctgtaatttgtatggcttctacttgcccagggagttcttttttatcacttttgctcccagcacctccctccgtatagttgctatctgtagccaatgtccttcatgcatgaaatattgtctgaattcattatctgttcctgctggtatgagttgacatgccattcaaatttgtgtcatcagtgtctggattgatacatgttttcatactggaatactggatttcaatatttcttactaccctatgtttgcttgccacaccatattcctttatagtttgtacatccggtggccatattctctctttagatcttgcaatccaacaagtcttgatctgacaataattcctgtatactctttctttaggttgtg

SEQ ID NO: 234 - DNA, 97 bp, Setaria italica
  source 1..97: mol_type = genomic DNA
cgcgaggtaagctatcaagtctcacgttctggttcagttacaagtgcacagaatttgtttgaaccttttgtttcccacttgcatcatacaggttcct

SEQ ID NO: 235 - DNA, 101 bp, Setaria italica
  source 1..101: mol_type = genomic DNA
cgataggtatgtttgcttccaacctagcctttctttcattcagcaactttggcaatgccttcctgtttataacaagcaaggaggccattttacaggttagc

SEQ ID NO: 236 - DNA, 110 bp, Setaria italica
  source 1..110: mol_type = genomic DNA
acccaggtcagtgcgctagctcaaacttggtcaatggcacaacagctttagcctctattgcttccgtgccaactctcttactcactttacgtgcaaccttgcaggtcagc

SEQ ID NO: 237 - DNA, 153 bp, Setaria italica
  source 1..153: mol_type = genomic DNA
cgctaggtgagcgccgcgcgcgcccgtcctctcccccgcacgcttcgttgcttgcagaattccgtgatcgtttcatcctgtctcgtttcggtgcgtgattttttgtttccgctgacgggtggtttggattggatctgggcggaccaggtgcgt

SEQ ID NO: 238 - DNA, 115 bp, Setaria italica
  source 1..115: mol_type = genomic DNA
ttccaggtgagagcgcgatcccgtcgccggatctccctcgccgcgtggcctggctgtgttcgcgtgctccgaatcctgattgtcggtgccaatttgctgcttgatccaggccaag

SEQ ID NO: 239 - DNA, 669 bp, Setaria italica
  source 1..669: mol_type = genomic DNA
cacgaggtacgtgcgccctggcgagatcccgtagcatgttcattgctcgtaggtctgcgggatcgggcctgcttcatgtgttgggtcaaatccatctgatggagggcgtctagatctcatctgagtgataaggccaggaactgagtcggtctagatctacgtgaaagggacatgagttactgataattgtgccagatctctgggaagcaagctttcaggttacttttgcatcatgtgggggccactgtataaagctttagctcgaagctttactcgagcgttgggtacttattgtggatctgattggtaatgtgagtgatcactgaattgagtgagatcaagcagcaaagtgtgcattaatttatagagctcaagctgcatcatggctctagtccagagtatctgttttgtggatctatttgggattttgaaagatcacaaagatccactgtcaatgctttagagatcctgttagaggtactccattttgagcttcataatagtttccgagtcatgtggagtgctgttcgaaaggatccagggctatttacgttagtgtttttcatgcttcatatttaaagtggagaaaccattgagttctagtatccttgttacagatcctgtctttcggacatttatttgaccctgttctgttgtgtccaggtcatc

SEQ ID NO: 240 - DNA, 764 bp, Setaria italica
  source 1..764: mol_type = genomic DNA
ctcgtggtaaaataactagttaactatgcattcctaaagacatttggctgtaaatccgcagtggaccttatgactctgcataagcacaaattcaatatcatgttgacatcgctttaagtcttctctttcagagcatcctgaaagttattgatcttggatagtcaatgacacataaagtgtatgtctttatgttgtctctgtgcttgtccttacatgtcctgtgttgttggttgaatggagcttaatattttctgaatttattattgagccttagttgttgtcttgttgacttgtagtactatactcgcaattagaagttgtagttattttcgtcttcttcagaagtccctgaaaatttgaaaatcatgggtagtcaatgacaattgaagtaccatgcatttattttgtcatatattcaatgcttgtacaattgcatgtcctgacttgtctgttgagtgaattaaatttatttttctcttaattggtcattggctattgatttgtaacttactaatggcaactcatatttggagaagcatgtgcattcaagttgattttctgacactgctcgtgttactttcttcatttctgatcacgaaaaatgtgatgatgggacggatcatatactccaataatagtttcatttcctcttggaaaaacagtttaacaaatcattcgtctcagctgttccgttttaagtgtattttcttcctcatgaattgtgcacttacgctgtaaatttgttctcactgttttaggtgtcg

SEQ ID NO: 241 - DNA, 451 bp, Setaria italica
  source 1..451: mol_type = genomic DNA
taacaggtgaaattacctgatcctacgtgacttactgacttgtcttatatctgcttcctatagatttgcaaacaagtgtttgtgaaaaataaataatacctatgggttgatacatgttgcaaattagcgtttaggatacaagatttgacaggataattgaaccttttacacaaccattaatgattagatcagtttgaccttagttttttattgcagcaataatttctttatttagttgctaagttcatccttccttagatgaatttcattttctattcccatgctcacttgaacaaccatactaggtcgtacagtattttgaggatagctgaatttgaggttttcgggcaacagtgcaactttaatgaaatgttgcagtcgagagtgaaagaatgttgtgcaatgttttcttccatggactaaagatatagactctgctttgcaggaagct

SEQ ID NO: 242 - DNA, 638 bp, Setaria italica
  source 1..638: mol_type = genomic DNA
cttcaggtacgtctccgttccgccgccttgttccgctcgatcctcggtgatgcgctacgcgttggttagattgattttagtcgggggcagagggggattgttggatccttgggtggaggaaagggtatcaccgattatcgctgtttacatgtggatctcgcctcccgccggtagggggaaggggatttcttcgcgtgcgtgctgtttagtgcatatttgttggggatatgttttggcttgtgcgaatcttaggattctcgcgtggaagaacccgatcctctctatgctatgtgatttcacctaggcccgtttggtttaggctcgttcgtgcgccatctgactcccagtttgctggtgccaattttaggattcgatgaattctgtaggttttacattaacctggttgatcctcgccaggaagaaatcagatcctctaaattcctgtgctatgtgatttctatctaggccggtttggtttaggctcattggtgtgttatctgacttctagcttaaatgcgcttaagtatgttaacatcttggaaatgttcgtggcagagattttttattctttgtggtagccgttctacgtcatgctagtctgtgtctacctgacttatctgttcaatgtccaggtctag

SEQ ID NO: 243 - DNA, 95 bp, Setaria italica
  source 1..95: mol_type = genomic DNA
tcaacggtgagtatccctaagcggcctaccatgatttcttccttcccgatcctctctttgtcactgatgttcttctcctgctcctgcaggtgtcg

SEQ ID NO: 244 - DNA, 99 bp, Setaria italica
  source 1..99: mol_type = genomic DNA
atcgtggtaagcaagcgagcccccaattacctcccgtctcacgctgccgtgccatgtggtgcttgcagtagctaattcttcttcttgctgcagggcacg

SEQ ID NO: 245 - DNA, 1533 bp, Setaria italica
  source 1..1533: mol_type = genomic DNA
acaaaggttagggctaccttgcctgcccaatcaattctggcctaatttattctagggacgcactcatattaaatcagatgttctttgtaaaattgaaacccaatgctatgcaatgcacagcttgtagcaaacccacacgttattctataccagactgcccggtttaaacggttgttccaacagttccaagtactgccaactcagaaggttccctgagctgaatgataacctcctgccctctcatagcatgataagttatgctgtgcttcttgaacttataaaatcgttgcctcaaaatcctttgattattctaaatcagtaagaattgaggttctggttagagcaactttgaagtttcactggcgctgattagagctagccattcagccaatttttactcccttgcagtctatgtcacactgatgctctgctttgaagtgctctgttctactgcatttgctgtaagaattgaactctttgtgaggaaggcttacaaatatggctggttcagtacatattgtactcaacaaaatttatcttttgctaggtcttgaaatgctttctttggcttccttttttttgtccctactttgcgatctaggacgcatccaccctttaatggcttgggattgatctcatggcaccattcttgtgcatctctgcaaactcatcatgccacatctagttctctttcatggtactgtgaactggtttatttcttgatgcttgagaatttgctccaaaaaaagtgagacgattttgttaccttattaaggttggagattgatttcctgcagaatgagttacattgatccatggattatccggtgtctgaataattggtctatgatatgctgatgaatttcgtgtgctggcatcttagtttcaaggattggttgaactgttctcgtcaaacattatatagtgctaagtgtgtttaacatgattactaatgataccttatacccactgatgagttgatgaattattctgtgcatgttcaagtttcaagtaatttccctcaacgttcctgaagatatcttgtcatcaaactattctactgctatatgtctgttactatatcaaaattttggttcattggacgcccattctatttttctttgcttgcacagtgaccctcatgtttggagtagttcccctcgccccctgaagttctggacaattcactcttagaaatggtcggttcaacacatgtttccatcacaaattatgcctttagaagtctaatttgaaatgcctaaaacaattgtagtaagggtctatgagctgttgatacctgatggttctctcttagattgtgatagtgccttgaccaattatcttgtattattattgatcgattgcataactgttgaaattgaacattaagtagtggcccaattcttcccgtgtacttgcatactgcatgtgcctctctcattattctctatagtttctgctgtgcatgagaatttagcagcatatttgaatgttttagcctcatgagaaacgttattgtacttgcaggaggga

SEQ ID NO: 246 - DNA, 180 bp, Setaria italica
  source 1..180: mol_type = genomic DNA
caacaggtaagctatttcctccttgtcctttgaggttcttggttttttcgtcaataactgtttagtactgcatgcacttgttttgagatttattagctagcatgtaccaaactgaagctgaactttgagcgtttgccccattcttgatcactcgacctcttgcgatgtatgcaggagcgt

SEQ ID NO: 247 - DNA, 110 bp, Setaria italica
  source 1..110: mol_type = genomic DNA
ttcctggtatgtctctccttcctcccgatcactataattcagttgatgcctgatatcgcgcggcaatcgtttccgtgacatgtgtggaatcggatttggcgcagggtctg

SEQ ID NO: 248 - DNA, 861 bp, Setaria italica
  source 1..861: mol_type = genomic DNA
catctggtgagcagcggtttttctttaatttcggtatcctgaaggttgcttttgtcggatttgtgttcgagtttgtgagattcgatgctacgtttaggcgattgggtatttgggtgtgctagagcatcggatatagttctgtgcaagattttactactctatttatttgcttgtagtgaactgtatttatgtgtcaaatctatcatcactcgtcagtgaaaaggtgattacttgaaatttatatgtcagttgggttgcggttacagtcagagtgatgagttcactaaaaataaaaggggaaacttgagctgatagtggtgcatggtgcaatactgcatcttttaaaattggacatgcacagttgattaatcatatattcgttgtgataaattgttttgtagttgtcttggctaatcaaaatccaaagaatctcactcaccagtgaaatggtgattacttgaaatctatctctcactttggttcaataatagtcatggtgatgacccaaaaaatggggaaacttgaactgatagtggtgcatggtgcaagactgcatctttttaaattggatatgcccctttgattaatcatacattcgtcttaataaattgtttagtaattgttaactaataaaaattcaaagccatctctgtaacattctgctcgtggtctttagtttgattagtgtcatctataaaaccttcaaaaatgaaagttttcattataaactaaaaagtatagctgataaaaattctttatgctctggacaattctttgttcctccatgttggtttttaagctttaactaatcagttatctctatttctaatcactgatccaatgttattttttcagggacgt

SEQ ID NO: 249 - DNA, 351 bp, Setaria italica
  source 1..351: mol_type = genomic DNA
cttccggtaagtactgctgctgcttgatttccctagtttgttcaattgttggagttcttcatcaattaatttagcttatcacatatatgttatttagtcgacatttgcaactaaaatcttatatgacagtgttgtaatttgtgttctgaatttctgatgttcaacttaattaatatacctcatacagtatgcatgtaagtatttattgtctttgacattaagaagccgcatgtaatgaacttatgcactctaggtcctatgaattgaaaatatatgcattcttttcattacatattttcatgtttgtgctaatgcttaccatgaatccttatttggtgaaaacaggtcctt

SEQ ID NO: 250 - DNA, 1234 bp, Setaria italica
  source 1..1234: mol_type = genomic DNA
tctcaggtcagctctccttccttcttgctgtggcttcaattctttccagccaacttcttgttgacttaattttactgtaattgctgcacaagattttgcttcgattcgtcttgaccctttttgctatggctaatttctagtgtagtgaacggaacctgttctttagcttgcttatctcagtagtaatcctccatggtagtgacttagtaacgcacgtagtgtgcaattccgagatattgcatcaaaggagtttagaatccatgagaaacttgtataggtaacaatccactatgctatatagctctggcatattaaagttatgcgactttcacaaggctactattgaatatactgctctacagtcagtgaccctaaagaagatggaaaacaagatgatttttgttgttttaattgaaattagtaggtcaaaatatgttacatttcttatttcttgttcaaacagtagcttaaaattccgtgcctttatcttctattttcttcatttgtttccagcatatagcaatttacagttatctgccatcagtacggggattagcagccccctgcttaattcttttttttttatgaaagaaccagatcttaagccagctccctttggcttctaatttgtacagcctttcttgcacctcgagggatttgtccttattgtaataaatatattccattagcatactgtactactttagcatgtgctgcttgttattatgcaaaggcatcctcaaccgcaagtggtagttcatttttgatgcagcacttcattccacagtctcctcagtagtgcttcaaagtttaaaacgcaaaaggcaccattttgagtgtctacccacaaaaaaaaaagttgagtgtcactcactcaacgtaaacagggacatggcaaataagaagagtaaactgcagtcgatcctttgtaattgtgaggattgtacatagaaaactataggaaaattttgctacatcaattaactaacttatagtagtcctgaatagtccatatgggcaattaaacatgtattgttgtgaatttgtactgcagtacttaaaattatttactcctgttttgtatattgattcttaatctctggtactacctctcaaaatatcaaattgtgaaagaacgtatgctatattgctattctgcaagcataaaccacaaaacgactgcaacaatcaagggcactactaatggttctacttgcaaccgcaacaggagggc

SEQ ID NO: 251 - DNA, 516 bp, Setaria italica
  source 1..516: mol_type = genomic DNA
caccaggtgagtggaaccccctcttcagtcctcttctcacccactttccatttccagtggttttgttacctactcgcactgaaatgtctccatccaaaatatcagacatgcaaccaccgtctttccattgtgcaacaaatatagtggcatgttctggaaagtctgttctaattctaactaggttctgtatttattctcacctcacctatgtgaaatattttttgtgaccaaactaccggtaatcattcactcaccaaactactaaaatgatgcagacagagtgtggcatgccattgacaggcatgacctataactacattgctctggcctctgaggctctgtgttaatcttatcacaaaggcttgtctcaatccatgtagttggcatgtattaatctaggctgtgtttgggatatgatatcattctggtcctttgctaacgtacatttaatcgcctatcgatgccgaagagttggtataaccttgttcctgttcctatcattgtttgcaggtgatc

SEQ ID NO: 252 - DNA, 105 bp, Setaria italica
  source 1..105: mol_type = genomic DNA
caccaggtgagttgctgatttcatttctcattatcgatctactacatatgtatagtagcatactatatcgctagcgactaactaagaccatgcatgcaggtgatc

SEQ ID NO: 253 - DNA, 1339 bp, Setaria italica
  source 1..1339: mol_type = genomic DNA
ctcccggtgagtacgcacacttatttctcgttgcactcaaagataaattcacagtactgtaccacgcacagtagagtaatcagtgaactgttactgttggttggttactgctagtgcacgcagtaaagggtagtcgatgactaaagactgcagtatactgtagtgtttatgcatacggcccaaggcagaaatataatggatgttagatcatgtaggttacgaagtgttgatgaaggactttgagctgacgtactactagttctttggacttagctcaccaaattattagaacttatgtagcaaactgaatacaaattatttagtatcggagaaaaaactatgcaagtgtaggtccagtgggcgggtcctcttgactttggtgctagagtgcagactgcagaggctaacggtgaaaattagagcgcaaatcatttcagcgcgaggtgtttacagcaacacaaaacctttatgccgtaactcgtaagcgagttgggtagagcagtaaatgaagcgtgtaacataaaagcaacatcctaacaaattaagcccattttttgaacatctagttaaattctgaaattttactgctgctgcctgcttcagcaactatacttttgggaaactgcaccatactagttaccagttcatacagaacatagcaacgaccatatagcaattaaggcaaaaaagctctcaagagactgacaggttaagcattttcaggtcacataatgcacaattagtcatgccatacaagatacgcaatatatcgaatggtcccaaatcctagctgtgcagacctctccaaatcaggcgcatgtgaagatgcatcttcctgcccgatgattgcatgaatttgcactgcatatgccaattaagcagagaggaagattctcttgtgcgtaggcagcagtgtcttcagttgtcgtccctgtcctaatcgctgtcccctacagcgaacttgaggtggctacgtctgccatgattggcacttcttcttgaggataaaatttatcatggataggaacaaggtgcaaaattccaagaggaaattgtggtggggcgatagcctattttgccttcagatttggtaacccatccctttctaggaccacgattttaaaaccctaagctatgttctggggaaaaatataaaaatgtggaactacttgttttgtcagtagctgttctgttgatgtagcggctgaaaagctagaaagactagtactagaatactatttcattttcattatagtatgaaattaaagttactctggggtaactgatcggggagctaaaatataaccgggattttcctttcaccctgtgccaggtgtgg

SEQ ID NO: 254 - DNA, 544 bp, Setaria italica
  source 1..544: mol_type = genomic DNA
caccaggtacgtacgcttaccggtgcttgttcagtagcgtcgacaattaaaaaagtcgccgcgacatgcatatgcctggctactttctcatgctcaattgctagttgacaaaacatgaattctctaatgcaaactaaccagcggctcaggataggcctaaagactatttgttaatctatcaccatcaccacacaccattgcatcatttagtacagctgtttagcttatgcatgacatgtacactcattaaccaaaaatatacaacctaatcccttgccacaccctcctaccttacagacacctaaaagatgcccagtatttgtttggaactactaactaacctgttgtcgtacaccttggcttggtcaagcatttaactacgcttcccacaagccataatcaaacaaatctcttgaggataagcaagtaaaagaagtgcttaggatatcttacattatgcaccatggaaagcatcagcggtacggtgtagtttaattagctccaccactcactactgccgatcgtattgtttgtgcaggtgatc

SEQ ID NO: 255 - DNA, 674 bp, Setaria italica
  source 1..674: mol_type = genomic DNA
ctcccggtaagtagctctgcactgcggcctctcacctatccagctcgatcatgtttgtggcgcgcagtagtgggataacgatgcttagtttcagatatgaatttgcttctttatttgctgcaaggaaacgagctggtaggaatattcgttcgatcactagacactagtgggggtagtttttcgtgagatggtccctagcattagcacactacgagtagagcagttgtgaggtggcaattcgcaagcgattagcatttgatatgcattctttttctggacaggacatactatagaggtaccaaagaccaatggaagttttcagtgatatgataggtttactgtttgtctccgtttagatatggtgaaccatcgctttaaaggagcagcatgtgaaaaatatatatacagttcattgtcttcttgtaggatgggtttgaacaaactaataacatgtatacacgcttaatttagaatttcaaaaatgtttggaacgtaacagcagtacggaaagaaaattttttttggtcttggcgtactgtatcatgcatggaaataaacataatgctgaattgaaacttggtccgttaactgacggaatttcagaacttttagaaaaaatatacacagtcgtcatataacgttccaaactgtcctgctttgttcatcaggtgctt

SEQ ID NO: 256 - DNA, 625 bp, Setaria italica
  source 1..625: mol_type = genomic DNA
caccaggtacgtcctactacactacacctcgtccttctcctgctaattaacaacctaaagcgctaatggcttcgtgtcaaagaaattaagaagtgctaatggcttacagcatggccggtcactatcactaacaggcccaagcttaactaatcaaacaaaattattgcgatgcttctcagccgtaagttcactagtagcagatagaacccaacagattattttaacattaaaatgtatacgaaaggctcaggaaagtcaggataaggctcaatgatcacttagttaaactgatcagcagatgtcaccccaattgattggtatgcagttttcttagtacgatagcctatgtactactcacagagctacaatgacattttcagccacaagattaaaaacccattaagtcaaaacacgcagtctaatctgttcccaacaaccctccgacctaactgaaaaaactttagcctatgtacctaatactagcttgttccatcttactgttgcatatcatttggaatatatgaaatcgcaaccacctgtaaaagtgtgatgaacataatcaattggagttggagtgtcttgcatcgatcgcttacgctgcctgtatatgtggttgcaggtgatc

SEQ ID NO: 257 - DNA, 993 bp, Setaria italica
  source 1..993: mol_type = genomic DNA
cgtcaggtacgtcacgtgcagagcgcggcacctcagcaatctttcagccatttctcgcgcatcagctcctttgtgtttctttctctgttgcgcttgcgctatgcatattcccaatttcttatgtgtttatcatggcgatccaatcaggaaaatatatgcacgcagcacgcatcgcataagatgcctagagattggcatgcctagatgacaagaccttaaacgctttattaaactctattatgtgtgaaactaaaggacatgcctttttttgtggagtattaaagcacaatttattccaaagacgttttgagaaaacaaaaaaaatgaacttaaagattggcatgtcaagcgaaaagagttgttaattacctgcagctgtccacatagctacatgaacaaattagttacatgcgtgcaataatactctattattgtatacccctatctagttttctcccatagtttcattattgacccactgtagtagtgtcggtgagcatacacgagcgagtgtgatttccatggcctatgtaccacgaggcacatgcaaaacccggccgctcgctgtttctccgccgggccccctgcacaatgatgtgtcctctccagtcttcactctcaccctatccaggacagtacaaaatctacattgctgattccttgtgccacaccgtaaagaagagacaaagttcatgtggggggcacggcaccgtgctcggtaaagcagcgccaaagtgcatgtagtttcaaagcctcatggcatctcatgtctgccatgggataaagacagggtaaactaaaagggcctctctagctaccatgccatctctactttttagacttgtcaacactgtagtagtagctcaaatgatacgcgaattcttttttactgccaattttaattacattgcgtcccggactgctgcactgaaatcaccatcaagttaactcttgacatttctgatcattggctgcacgaaattacaggccggt

SEQ ID NO: 258 - DNA, 633 bp, Setaria italica
  source 1..633: mol_type = genomic DNA
ctccaggttgctactgctttcctagctctttgctactgtatcttattgtttgcatgttttgcactattgtgacgcctgataaacttgtagttcccgaagcgcactatagctaatcagcaacgtttcgtaccataaagttttggcttctgtgtttagtacaatggaactgtacgtgatccgtacaaaattattttgaaatccaaacaaacatatgatgaagcactaaaaattcaatgattattgtgcctatttaccaacttcatctgcataaacacatcacttaaagtgcagtctacaactccaactttttttctatatatgtgcgtaggtattggaaaagtcagcatggaagaatctgcagttcctaggctaacttttcttttaccgtaccagtgataagatagcctacctacatttccaagaggagcacgccactttatttgtaccatggttcatcaatccttcgtttatttaattatctactatgaaaaaaatatgactacacaataattgacagcctccacatgtgtgaaattttgatattccattcaaggcatgtttctaatgactctcatgcgcctaatctaactagtaatcttctctgtcactatctttctctgtgtgcagggatcg

SEQ ID NO: 259 - DNA, 865 bp, Setaria italica
  source 1..865: mol_type = genomic DNA
caacaggtacataccttattcggagatacttatatacagtatcactgtttgagtagaatacctgattagaatctggtggctgtagtctttagggaaccatttaagttctacaattggtggcgtgtcatacaagggatagatgaccccctggttactgtacaatcagcttatcatctctgccaatttcagaagctcatgcacttcagtatcatctataggctaaaactagaattcagagatggctattttacacatttttcatgtctgaatctcagttcaaatgttgaactaggttcctctaggcatatgcagaacactattagacttttatccactttgccattcatcatttctagctataatctccagaactagatcaccattaaagatggtagtggtaccatttacaggcccattaattgcatatcaaataccttagtcaacttgtctttctattttcaataattcaatagtttgccaatttttaggctactatagatgatgctaataggcgacttccagttttggatttaattggcatggctacaatatcactaataggctggctgaccaattgagttattagttttgcaacactgaattcacgatcatatatagcctatcaaaagatagcgtaacaatggtttttatgggcattaattgtgtatcaggtacatcttgagtctgaattgtatattccaatgaattatttaccttatgtttgtttagcatagtatttagaaaccgtcagcattacctgcatgcaggacatggtgatagatattgcccacaccaatgtgatattcctttatctaccgattcttactctatttttcatttgttgtctttggtcttgcaggctctc

SEQ ID NO: 260 - DNA, 580 bp, Setaria italica
  source 1..580: mol_type = genomic DNA
tctcaggtaagtccattaattcttgttttgctggctatttctacatcacatgattgcctattcatatgtaattgccaccagtgttcctttttaagctcgagccatttaaaaaatattgtatgccctgaccccccatcactggttacacagtgtcatagagctggtacaaggtttctaatgtcatctagctttctcttttcaccagaagtcttgcttttaagatggaaaagttatcacaaatttagaattttggttggtccatgatacctagtcaaatgttcaaaaatcacaaggctctagatgggccttgggaggtgtactgcctgattgccagtatggaacaatatgtgaccattaggcgctaggcgccactcttcgcctagcgcctccaaagttgctaggcagtaggctctggaagtctctgtaatgtactttgtatgatgaacttaacattaaactgtacttagcctgttttactgttttcatttgctgatgaagcctaactgcacatgtctcatactgaaccttattatcattgatctacgaaatgtaactgtgagtgatgtgtttacaggtgtgt

SEQ ID NO: 261 - DNA, 94 bp, Setaria italica
  source 1..94: mol_type = genomic DNA
cgagaggtgagctggaagttgtcctgtgatcttgtgcctggacgctaatgcagtcagtctaatgctttgttggtctgatgttaaccagggttag

SEQ ID NO: 262 - DNA, 502 bp, Setaria italica
  source 1..502: mol_type = genomic DNA
gcccaggtgaggccccctttctatgccaattctcacacttctgactttttgttcatctcatccttctttgagaattctgtcgaattttggtctatctgtaatgattccagcacacagatagtttatttgagatagcgctgcccttccttctgggtccttgtagtagtagcatcaaaaaaggatattttggagataatcctgaggacgatctttactggatgaaagactgaagcaaaaagctttgagaaactttgttggatgttctgaaaatcttttctttatgagttgatgacacccctgcgttcaaaaccacttgcttaaaaagtggaaaggggcatgatcaaaagatggaaaacaaataccagcatataaaaaagctccagttttgtgaaacaagcatcagggaggataagcatgtgactggccgccgatttacttgcgtagctcacctatttcacagtattcaatttctctgtatttgcccgttgccttgcagtgacac

SEQ ID NO: 263 - DNA, 447 bp, Setaria italica
  source 1..447: mol_type = genomic DNA
ttacaggtgtgatatgccgtgcctcaccttgaaccatttcctgaagaaaaggaaatatcctcagaaatttaaaatgctatattgatcaggttattattactcttggagtttggaagcgttatcttggattttggtttattctaggtgcatttacaaactatgtaaactatatttttatgtatttcaataattctagaaagtgacaggtagaactgatccacataaagttggatattgcagggacaggatccatacttaaatattcaatcattctatgctgcagatactgttcatactacacaatcaacatcacttttttaaaaaaaacttagggcaccttacttcaaaaagattggcatgcttgggaaactgtcacatgctcgtattaatacctatcctgtctggggtggagtgaattttaaagttgtttttctgttgcagttggaa

SEQ ID NO: 264 - DNA, 934 bp, Setaria italica
  source 1..934: mol_type = genomic DNA
ccgcaggtattatcacaataatctcataccattcctgtatgcatcattttgtcatcatattgcatctatgcagtcaccattttcatgttttttgtggacaataaattgccaatcaataccacccaagaaaaaactgtagtattcagtgtgtaacattaaaaacaaaatgaattcagtggtagttatgagttgtgatttggtgaaactatggatatgaaatagtaccagtgacaaaaaaaaacattcccatgttcttatcagttttattagacgacaaaatctcaatttaaccaatatgattaatcaaatatcttatagtaatttcataagggaagtttagatacgagtcatactttcattctttatataagctacttatctatgttgcttttgtcgagtttctggaagagctccaataaagtataaatttcattgccactacagttgagctacctttgtcagtgagcagacctctttatttgttcttacagtaagatatagcttatctacagaaaaatatccttccgtggccgacattcacctatcattgattggaccaaaagtaattttctcaacagaacttcttgagagttactatattaagtataagcctggatatcatgtgatcccatatatatctaaacagagcaaagatgtgagtgaatatcagtaagaattttatgccctatcacagagaacagtcattcttcttattgtctacataaaggttataggacaagatctaaatctgtatacttgagtctagggtgagtaaacagacttcatttgtattctcaacagtactatttatgtacctagctatagatgtagttgtttcttctcagtctgataacaaaagcttgcaaaggaggtttacctgttattgtaaagtacaagtactctgtactgaaaccatttcttgttgcagatttca

SEQ ID NO: 265 - DNA, 956 bp, Setaria italica
  source 1..956: mol_type = genomic DNA
attcaggtaccgatccgtccatttcgccttcgttttcgcttctcgatgccagatctgtggtagatcagggcgtatgtcgggttgatttgtgctggatttagtggatctgagtaggggggggggttatggcatttgaaatctgtagaactgtgcggatctagctgtgtgtgatggtggctgcccagatctgcgattgcttggcataagccgtaggtctggtgaaatggtggctatttgcagttgttattattatagatctgggtatgcagatgtggaatttgaatgggaattagccggaattactcattattttacctggtgttgttgattcagtagatctgttagcttaattgatgctgatttagcttattcttgggtggatctgaacattgttggtctctattttaagaaagtagagtctccggttcgtaacatctgtttagatctagatgcttgttgtgtggaaaaatgtgcttattataatttaacgtagatattgttaaaaattcgaatcattctcagttagaagtgggctagtgacggctgtgttttgctattcaggtttctgcagtgttcatgtacatttgctaaataatgtccttgcaatctgtaattaagcatgatacattaggatgtatgaattcgatgtaatggtttgaaaggcatggcctatgtgttgttattccttgtaagatctagatctgcctgctgtactagagtgtactaggctagttggcttagaatgtgtctatgcctctcatgtacatgtattcctagatcttattgatcagtcataattatattacctagatgttaacttgctcgtacaggcagtcgtgtggtatgcagttatcttattagcttgtttatgatgtgcctttgtgttatctaatctaactgtttccatttgtgatttgcatctctaatgctgcttgttttgctctgttcaggctgat

SEQ ID NO: 266 - DNA, 777 bp, Setaria italica
  source 1..777: mol_type = genomic DNA
atccaggtccagtcgccgcccccctctcctcccgtccatcatctcgtcgtcctcgtcgtttaatttccgatttgattcagaggagtcctgcgatttgcagttgcagggcgttagaattctgatttggggtgaactgttttgggggaatttagtcagatctgttggtgctagtaattttagggttcgaaatttgctgcgcgattcaaactgtgattgaggctggaagtaagtagttgctgtcggttttgttgtgcggtacctttgcagcggaagtaagtagttgctcccatcgaatcgaatttttataatttgcagttgtgggtcacgcgttacgcctgctctcgtcaaattgtgcagtgttatttaaatgcttctgtgctctattcgtagtcatcagttttgatcggtttgtgtgtaattgtggatgaattgcgctatttctaaagtttcagttatagtgtactagaagttgattagattagaaaaacgaatatgccttctatcaattcggtggatcccgttcagattctttaaattaagtcatgttcgtaccatttcttagatctgaatgcaaattggactagaggttgtgttcggtgcatgtatctctgagcaactgatatatcgcttattgatgcactgcataatggctaattaaattgatgcatatcataagttgctccacttattgataacatgttgaacccgtgcaattgctcctttgaaccctttataatttgcatcccattaaactgcttttttcccttgcagcctgat

SEQ ID NO: 267 - DNA, 165 bp, Setaria italica
  source 1..165: mol_type = genomic DNA
ctggcggtaagtcccatcgatcgatcatctcttcccttctcttgtcgtggactcaaagctcatcgtgtcttgttgtcggatgtacgtgatggcgtgcatcgtgtcattggtgcatgcgtgtgtcatgtgtgtgacgtgcacgtgtgttggcttgtgcaggcgaac

SEQ ID NO: 268 - DNA, 280 bp, Setaria italica
  source 1..280: mol_type = genomic DNA
gttcagctgccgttttcgtgtagtctcctatgtgtgggttttttcatggggggagagaagattgcaggttatgtttgtgttctgcagacggtccttatttcggccacttgtatctgtggttgccccagttacctttgtactcctactatttcgtcgccctgtgacagtgaggtcacctcgtggaacttatggttggcttgatcggttgaaactgttatagctgatagttctataagtttttttgtgggtagaggattatgtggatttttaaaatttatta

SEQ ID NO: 269 - DNA, 396 bp, Setaria italica
  source 1..396: mol_type = genomic DNA
gccctggattcaccgtctttctgctttattggggctgttcttttgtcgagtccttgccatgtaagctactgtgtttgagatttctggggttccattgagctatattgccggatttgttggttgggtcaaaaccatgtaccttttagactctgttcagtggctgctatattcaaccagtgctgaatcatacattgtgtgttcaagtatcgctttgatggcaaatttggtgccaatgttaaagagtattgaactatctactagcatgttctgtaatagtttttgaatgactcattatcatttctcttgtacattcattctggttatgacctagcggtggtgtcgcccagttagtgttgcccagttaattcatgatttctgatgtaggtaaaaaaaaaa

SEQ ID NO: 270 - DNA, 435 bp, Setaria italica
  source 1..435: mol_type = genomic DNA
ggcgccctttgagaagaagcttttggtctgctgcgcttatcatgttttgtggcttctgtgttgtgattcttgatctgccccttgctatcatttgtattgtactgtcctaataagtggtacttgtgagggtattactgtgtctggttatttacctagaggaggaattattgtctgctatttctggttttgctgtttatgtaatggtgaaccaaagaatgaagctgcaggctactttgagaaggaaggggacctgctgctttctatcttgtcatgcgtgattacttgaacagtcctgatgatctattaatgttctttggtcagtgcaagtgtttggtgtagctccaacaggtagtgtttatgtttggtgaagcagcaatggccgactgtatgtgtttggtgaagctgcaacctgcttgtgctaactgaacatgcaga

SEQ ID NO: 271 - DNA, 372 bp, Setaria italica
  source 1..372: mol_type = genomic DNA
tgaggtgaatactgttaatatggtctcgggtggctgagttgtacttcctgagacaacatcgtcgacaatcatgacttccttgttttgttttcaccttgagtcatttggtcaattgtttgttcccaacctggtgttgaacaacagcgcattgcaagatggtaagaagagcaatctacttcttaccatcagaacagatgatcgtggcgtgagcatgaatatgtagaaaataaacgctcatacttgaaaggcttttcgttttgtatgtgataactgtgtaaattctgtttgtggaactagcagggatacatatttgggttcttaaataaaattggtcccgggtagactacgggtttcgcctctagtaaaaaaaaa

SEQ ID NO: 272 - DNA, 377 bp, Setaria italica
  source 1..377: mol_type = genomic DNA
tacgcgctgctagtagccaagtacctacctcgagggcacactgtaggcagtgtgccatattacaggttcagattggccgggacaaagagtacactgcgattttactatcctcggtatgctggtactacaggttcacattcacatggttactacctggcctgtggtatgctggtactacaggtgttgctctgaatagctcaggcttgacccaagtaagagcagtgcaaattcccaatttccagaaaacaggaggacctccaaaggacttcaatgtaattttaatttctttcagaggtccttttgcaaggggctggatgtaaagtacttttataataatccaagccattgtgcttctcaaaaaaaggaaaagaaaaaaa

SEQ ID NO: 273 - DNA, 336 bp, Setaria italica
  source 1..336: mol_type = genomic DNA
ctgtggatattacgtcgatctcaacatttgtgttgtgtgtatctgtgcatacacctgtatgtgcgtatggtcaagatgtactacgtatataatgtagatagtggggtttttttcgattttaccatggctgtttcttttcagttttatatatatgtacttgcattataattcccactcaatttgtatccaaagagtaatattcatacagtccacaagtaaaaagagctgtgaagtcactcgccgaatttgtaattaatcattgtaactcccctccgcacacgcacaaaattgttgtaacagctgtcgtatttgtttttacgcacaatctgaaacgaa

SEQ ID NO: 274 - DNA, 315 bp, Setaria italica
  source 1..315: mol_type = genomic DNA
gaaccgtccctgcagtggcttttcgtttaattacaaggagggtgccatcaaagaagccatttgtcttgaataatatggaccgtgtatctgctcgtctgtgggttagattagtatttttcttggcacgattatcgcaccctgctcatacctgtgttagtcttcgtgaatttggtggttttgaggcaaagtttcccgtgtacttgtattgtaaaaccgagtggatgtctgcagtgtttcatctgcaactctgaggtgtgttacggctcgtattaatgatctttgggcaagaaaattgtctggaagaccaaaaaaaaa

SEQ ID NO: 275 - DNA, 319 bp, Setaria italica
  source 1..319: mol_type = genomic DNA
gacagtagcggccaaccaattaatttggtacgtacaacgcaccacatttactgtatatacaaaaactagccgaattgccagcgtaaattacatgagagatggggttgtgggaagaaggattataagttgtacacttgtaccctgctctagccaagaattatgaggccagagcggcacataggccatgttttgccctcaggatttgcagatagtgaattctgaggggagcactgtttatttcttcctgtatactactagcatgtaactattgttcttagccttcttatggaaatatctgaatgtgtcctttcttttttaa

SEQ ID NO: 276 - DNA, 291 bp, Setaria italica
  source 1..291: mol_type = genomic DNA
tgcggcggccggggcctgaaagaagggagcacttgaagtcgtcttttcctgggttccttccttatttctgaggccaaaagaagaagagtttggttttcctaggcgggcatcaagaatcaaggtcttccattgatgtgggcgttgctgctagttttgagttgatttggtagttggggatgcatggggtgtgtgtgtgcagtcggtcatgggtgctcccttgtttcctggatggatggatgttgctccttcaataaacgcaccggccttggttgccgtttctgaaaaaaaaaa

SEQ ID NO: 277 - DNA, 215 bp, Setaria italica
  source 1..215: mol_type = other DNA
atggccgtccaccacctcctccgccgcggggtctccggcggcttcccgctccacccgctccgcggcctcctcgcctcccagtcccaggtaccggcgactcctcccctcggctcccccattcttcttgtggtcacacatgttcttgattttgccgtctgtttatattcccggcggcgcaggagctcgagctcgggcggcgtccgttgagctcggcg

SEQ ID NO: 278 - DNA, 203 bp, Setaria italica
  source 1..203: mol_type = other DNA
atggccgtccaccacctcctccgccgcggggtctccggcggcttcccgctccacccgctccgcggcctcctcgcctcccaggtaccggcgactcctcccctcggctcccccattcttcttgtggtcacacatgttcttgattttgccgtctgtttatattcccggcggcgcaggagctcgggcggcgtccgttgagctcggcg

SEQ ID NO: 279 - DNA, 310 bp, Setaria italica
  source 1..310: mol_type = other DNA
atggccgaccgcctcgccgccgccgccgccaccttccgcgcctcggccgtcgccgccccgtccgcccgccgtggcgcgcgggccagccgcgccttcttacccaactcgtcggcctcgccagctggcgcgcgcgtcggcctccgcgccgcgccatctcggctcccgcaggtccgtaccctttcgcctctgttgggtctcagctctcgagggcggcttcaaacgcagatcgaaatggtgcggcagacccggctgttgttgacacgtgtgtactttacgtgtgtgatcgcagaaggcgagggcggtgaggtgc

SEQ ID NO: 280 - DNA, 383 bp, Setaria italica
  source 1..383: mol_type = other DNA
cgccgcggacagcgcctccgagatggagctccgcctctgccttcgtctccacgcgcgcctcccaccagccacgacgccgcccccgccgcctttcgcggcgcccgcggtgctccccgcgtcccgccgaattcggactggtaaggattgcttcagcgcaatcagtcaccgcttctccgtttgtttgggcgcttcgctccgtcaaaatgccgggccgcgcgcaaccatcgttgagcaaatttcgggagttccgatttgattgttcatagatgcttgctacctacgctgagagaggcccttcgttttgttgctgcttgtggtcaggtgggagctacggggttgctcttcggcggcccacgaggcgttcgaatccggcgattcgcgct

SEQ ID NO: 281 - DNA, 702 bp, Setaria italica
  source 1..702: mol_type = other DNA
atgatttcgccgccgatgccgacgcatctcctcccgacgcggacgatctcccctcgctcaaatggctgcgcagcgacagcgagcccctctcccccctcgatggctgcgcggccgcggcgactcccttcagggcttcaatctgtgtacgtttcacgggtctcattcccacctaatatgttttttttaacacgacttgaggggatatcgactggatttcatgtcgctgtggatgatattttggtcatatcaaatttctcgtctttgttcagtcaaatatggtcaaactggtggcgaaagcacatttcccttcttttaaaagaatacgtttcaaggaagatttgataaacagaatgaccaaattttcggtggcatactgaagaagagagagtccatcttagcacaaacaaaaaacattaataaaaaattggcactggtagtgaaatttctcaagcttgaattcatgtccggagataagttaatttatgacaggagggagtatacaggcacccagcttgtccatctgttctgctgtatctctgtacttatgaagatttttacaacttcccttacgaatttcctgaggagttgcctttggatctttatttcactaattattctgcctttatttattctccttgcttctaaacaaaacactaacacaagtaatcctgcaggactggcagagggaagttttcactggca

SEQ ID NO: 282 - DNA, 460 bp, Setaria italica
  source 1..460: mol_type = other DNA
atggcggcttccgctctccatctccgcctcctcccctcgccgccagccggtgtgaagctccagcagcggcgcctccgctcggtaagccccgcggaacaccaactagcgcccccttcttcagttcttctccctcctgcatctcgccgtattcctgtttctccgtctcgtgtgtgcgtgtgtgctttcgtggtgctcgagcatatgcccaacagtgtgtgagcattgcaattaattgtttctttctgatagtattcctttgtttgcaaagtgagcattgtactgcccttgactcattgctgcatttaatgggaactgaatgtgacacgttcaattgctggtttagtttaaggctctaagttgcagcatggacatgctagattctgaggttgtgtttgtgcgtggtgtttgttgcagagaatactgaggcagggtggtctgtctcgtagatattcaaaagtag

SEQ ID NO: 283 - DNA, 1014 bp, Setaria italica
  source 1..1014: mol_type = other DNA
atggaagcggcggcgattgggtcgcagtccccgctctccttcccctccagcctctggtgcgtaccgccccttccttccttcccccacttctttagtcgctcaggttcctcccagcgatttcctgccaagaacccccggggggccggtgccggttcttgaatacaattggcgcggtggtttgctattacattctgtagttcgccgtggggagacgaggctagccctggctaatttaagctgctcgccagtgtgtgtgcatacagccggcgggtaggtagtcatggggaaagtgcagagccagccagagcggtctccaattcgcggctgcctgcgcgttattcggctggtggtggatggtatgcrcagagggtgcgcgtgaattgaatttcacagtgtcaaaatgtgatcttggacggggttcgcgttattcggctggtggtggatggtacgcgcagagggtgcgcgcgaattgaatttcacagtgtgaaaatgtgatcttggacggggttttcccttgatgggctaccttccttttgcctgcgtgawgaatggggaattgacttttcttgctcgtccatcaatcatgcatgagctaaattatctggagtttggtgaccatgtgatttgcgaaggtcttgcatccaggttgccatttaacatgcttagggaattctacttcatttcttgttcctttttttgtttatatgtatttgtatgtgcctgtgaaagtcatttcttgcttgctattcagtgttcacagtgaactgtcagtttcatgttatgtctacttccgaataaaaggaaaacagttatttttcatgtaatttctgtataatcaataaattagcatgcaattgaatgtcttacattttgctttttcctgtgagaatgttcccccccttgtttaactctgtctggaacatgtttgactatttcagcaaagcaaaagtatcctctggtttaccaatctgcaatgtgaaggtcaagaatcgcaggcttgaggtagtttgccat

SEQ ID NO: 284 - DNA, 225 bp, Setaria italica
  source 1..225: mol_type = other DNA
atggccgccgcgccgccgctgtccgccgacgccctcagcttcctcccgtccgccgccgcccccgccgccgccgcgccgacgccggtcgtcgccgcggcgtggggcgcggcgagggcggcggggtcggtgagggggaaggcggcgctcaggatggcgagaagaggaagtggcctggctccggtggttgggaggaggccacgccggccgcccctctccgtgcggtgc

SEQ ID NO: 285 - DNA, 168 bp, Setaria italica
  source 1..168: mol_type = other DNA
atggccgaccgcctcgccgccgccgccgccaccttccgcgcctcggccgtcgccgccccgtccgcccgccgtggcgcgcgggccagccgcgccttcttacccaactcgtcggcctcgccagctggcgcgcgcgtcggcctccgcgccgcgccatctcggctcccgcag

SEQ ID NO: 286 - DNA, 81 bp, Setaria italica
  source 1..81: mol_type = other DNA
atggccgtccaccacctcctccgccgcggggtctccggcggcttcccgctccacccgctccgcggcctcctcgcctcccag

SEQ ID NO: 287 - DNA, 30 bp, Setaria italica
  source 1..30: mol_type = other DNA
gagctcgggcggcgtccgttgagctcggcg

SEQ ID NO: 288 - DNA, 21 bp, Setaria italica
  source 1..21: mol_type = other DNA
aaggcgagggcggtgaggtgc

SEQ ID NO: 289 - DNA, 222 bp, Setaria italica
  source 1..222: mol_type = other DNA
atggcggagcgcctcgccgcctccctcctccccgccgcctccccctccccgtccgcccgccgcgccacggtcgcggcctcggggtccgccgccgcgtccttcccttcctcgtgctccgcccgagcggggctgcgcctccgctcctcccgctcggggtcggcccgcttctccaaggcggctgggcgcggcgggggaggcggcgcgctgcgggtggtccggtgc

SEQ ID NO: 290 - DNA, 228 bp, Setaria italica
  source 1..228: mol_type = other DNA
atggaatccctagccgccgcctccgtgttctccccctcccgcgtcgccgccccggcggcgggggccctggttcgggcgggggcggtggtgtcggccgggatgaggaggaggagcggcaggagcggcggcatgaggtgccgcgccgtgacgccgctggcgagcgcggtgatgagcaggggcgccgtggcggcgaaggcggcggaggaggagaagaggcggttcttcgag

SEQ ID NO: 291 - DNA, 135 bp, Setaria italica
  source 1..135: mol_type = other DNA
atggcgtcgttgcacctgactgggccgcgggtggcggtggccgcgaagccggccgcgctgggcgggctccgcctgccgacgccgtcgattgccgtgccgacggggcggagggcccgggggctcgtggtgagggcc

SEQ ID NO: 292 - DNA, 126 bp, Setaria italica
  source 1..126: mol_type = other DNA
atgggggcactacccgtcgcccacaagctcgctctcacctcccccttcctcccgcgccaccgccgaccctgccccgccgcccaccaccacgggcagcgccggcggcgacatggagtggtggtggcg

SEQ ID NO: 293 - DNA, 306 bp, Setaria italica
  source 1..306: mol_type = other DNA
atggaggtgtgctgctgctcgacctcgtcgtcgtcgtccgtcctcaccgtgggccacggcggcgccgcgcggatgctggcggcgccggcgggtcggtggggcgcggcggcggggttcgggagggcgatggtgctggcgcaccagctcccgctcccgcacccgctcccgcgccgggcgtcgtcctcgaggccgtccccgcggcgggcgcggaggggcctgatcatggcggtgttcgagcgcttcacggagcgggccgtcaaggcggtcgtgctgtcgcagcgggaggcccgggggctcggggaggcc

SEQ ID NO: 294 - DNA, 137 bp, Setaria italica
  source 1..137: mol_type = other DNA
cgccgcggacagcgcctccgagatggagctccgcctctgccttcgtctccacgcgcgcctcccaccagccacgacgccgcccccgccgcctttcgcggcgcccgcggtgctccccgcgtcccgccgaattcggactg

SEQ ID NO: 295 - DNA, 62 bp, Setaria italica
  source 1..62: mol_type = other DNA
gtgggagctacggggttgctcttcggcggcccacgaggcgttcgaatccggcgattcgcgct

SEQ ID NO: 296 - DNA, 126 bp, Setaria italica
  source 1..126: mol_type = other DNA
atggcgccggcgctgagcgggaccctgggcgcgtcgtcggtggcggcgctgcggccctgcgcggagaggagggcgccgtccgccgcgagctcggtcgctccgcgggggagcggggcggtgaggtgc

SEQ ID NO: 297 - DNA, 143 bp, Setaria italica
  source 1..143: mol_type = other DNA
atgatttcgccgccgatgccgacgcatctcctcccgacgcggacgatctcccctcgctcaaatggctgcgcagcgacagcgagcccctctcccccctcgatggctgcgcggccgcggcgactcccttcagggcttcaatctgt

SEQ ID NO: 298 - DNA, 28 bp, Setaria italica
  source 1..28: mol_type = other DNA
gactggcagagggaagttttcactggca

SEQ ID NO: 299 - DNA, 81 bp, Setaria italica
  source 1..81: mol_type = other DNA
atggcggcttccgctctccatctccgcctcctcccctcgccgccagccggtgtgaagctccagcagcggcgcctccgctcg

SEQ ID NO: 300 - DNA, 46 bp, Setaria italica
  source 1..46: mol_type = other DNA
agaatactgaggcagggtggtctgtctcgtagatattcaaaagtag

SEQ ID NO: 301 - DNA, 201 bp, Setaria italica
  source 1..201: mol_type = other DNA
atgcagatgcagcagaccctcacgctgcggggcgtcccctccgcccgccgcgccgcgccgccgccggccagctccgcccacctcgggtcctctccctgcctgctgcgggtcccccgctcgctccgacgacggaggccccgctccctcagggcctccgcctcgctcgagcaggaggtcaaggaagtcgccgcctccccggct

SEQ ID NO: 302 - DNA, 162 bp, Setaria italica
  source 1..162: mol_type = other DNA
atgcctccgactacgatggcttggacctccctcttcctccccaccaccgccggcgccaccgccgcggccaccggtagccgccacccctccttcagccaccgatcccactgccgcgttcccatgacgcgcctccgtcgcgcgccccggctcgtcgtttccgct

SEQ ID NO: 303 - DNA, 156 bp, Setaria italica
  source 1..156: mol_type = other DNA
atggcacggtatcttctcgctcccaccaccaccgcctcctcctcctctgccctcctccccaaggatgccgccaagaacttgccgccgtcgcggaccctccgcctccgcgcgctcggctccaggtccggcaaggcgcgccccatcatggcggtagcg

SEQ ID NO: 304 - DNA, 225 bp, Setaria italica
  source 1..225: mol_type = other DNA
atggcgtcaactgttgccttcagctcagttagcgcgcaggctgggctgatccaaaagccaaggaaccatggtgtcacaagccactatggtttaaaggcatcatcatcatctgttagctttggatttgagtcgtcattcctgggcaggaatgcatccctccgtgcctctgtcgctccaaggattgtgccgaaggcgacgtctgggtctcagatatctccccaggca

SEQ ID NO: 305 - DNA, 56 bp, Setaria italica
  source 1..56: mol_type = other DNA
atggaagcggcggcgattgggtcgcagtccccgctctccttcccctccagcctctg

SEQ ID NO: 306 - DNA, 76 bp, Setaria italica
  source 1..76: mol_type = other DNA
caaagcaaaagtatcctctggtttaccaatctgcaatgtgaaggtcaagaatcgcaggcttgaggtagtttgccat

SEQ ID NO: 307 - DNA, 174 bp, Setaria italica
  source 1..174: mol_type = other DNA
atgctcccaatggccgtccaccccgccaccacgccggccctcgccccgcgcgctcgcgtcgccccgcccagaccttccacctccttggccgccgcctcgtcctcctcctgctctcgcatcgtcggtgtcaagaccaggaggctgccccttcgctcgctccgcagcgtcgccgcc

SEQ ID NO: 308 - DNA, 135 bp, Setaria italica
  source 1..135: mol_type = other DNA
atggcccccaccgcgatggccgccacctccgtcgctccattccaggggctcaagtccaccgccggactccccgtcagccgccgctccaccagctccggcttcggcaacgtcagcaacggcgggaggatcaggtgc

SEQ ID NO: 309 - DNA, 138 bp, Setaria italica
  source 1..138: mol_type = other DNA
atggcgcccaccgtgatggccgccgccacctccgtcgctccattccaggggctcaagtccaccgccagactccccgtcagccgccgctccagcagctccggcttcggcaacgtcagcaacggcggaaggatcaggtgc

SEQ ID NO: 310 - DNA, 135 bp, Setaria italica
  source 1..135: mol_type = other DNA
atggcgcccaccgtgatggcctcctcggccacctccgtggctccattccaggggctcaagtccaccgccggactccccgtcagccgccgcatcagtagcaccggcttcgtcagcaacggcggaaggatcaggtgc

SEQ ID NO: 311 - DNA, 135 bp, Setaria italica
  source 1..135: mol_type = other DNA
atggcgcccaccgtgatggcctcgtcggccacctcagttgctccattccaggggctcaagtccaccgccggactccccgtgagccgccgctccatcagcaccggcttcgtcagcaacggcggaaggatcaggtgc

SEQ ID NO: 312 - DNA, 222 bp, Setaria italica
  source 1..222: mol_type = other DNA
atggcggccatggcgtccagggccgccgcggccaccgcgtcgctcgacctcgccgccgcgccggccctctcgcgccgctgccaccgcccgacctcggcgcgcccatccgccgccgccgccgccgcccgcggactgcggatgcgcggggcggcgcgggtggtggtggcggccgcggcggcggcggcggcaccggcgaaggccggcgcggaggaggtcgtgctg

SEQ ID NO: 313 - DNA, 132 bp, Setaria italica
  source 1..132: mol_type = other DNA
atggaggccgtcctacgacatccatcgctgtcccgcctcaagcctccgaacccgaaccctcacaggacgccaccgccatccctcgcctccccttctctcctccgcctccgcgagcgccggctcaccgtcgcc

SEQ ID NO: 314 - DNA, 282 bp, Setaria italica
  source 1..282: mol_type = other DNA
atggcggccgccgccaccgccgcagccgcctcggcctccttccccgcggccgccgccctctgccgcgacggccgccggccctcccgcgtgagcgccgcggcgacgacgcccgcggaggcggcggcgctcgctgccgtcccggcgccgatggtgcgggtggtgccggagtcgctgcagcgggagagcgggtgcctcgtggcggggttccgggagcgaggcgcgggcgcggcggatggggatgggttcggggacgcggcgcctgggggaggaggagggcccggc

SEQ ID NO: 315 - DNA, 201 bp, Setaria italica
  source 1..201: mol_type = other DNA
atgtcggaggccgaccgggtacgcctccgcgcggcggcgctggcgctgcaggacgatggggtaagggacaagccagacgccaaggcgaacgtcttcgcggatcttggctcgccggtgtcgccgctccgaccgcgggcgagcgtggcgacgtcgtcgtcctcgtcgtccgggtcggccaagtcgccggtgccgtcgaatgct

SEQ ID NO: 316 - DNA, 224 bp, Setaria italica
  source 1..224: mol_type = other DNA
atggcggctctggccacttcccagctcgycaccacccgcgccggcttcggcctcggcgacgcctcctcctccatgttccgccccggcgtccagggcctcaggggctcccgggcctcctccccggcggccacgctcagcgtgcggaccagcgcgcgcgccgcgcccaggcagcagcaccgccgggcgcagcgcggcgccaggttcccctccctcgtcgtctgcgc

SEQ ID NO: 317 - DNA, 121 bp, Setaria italica
  source 1..121: mol_type = genomic DNA
gtccgtaccctttcgcctctgttgggtctcagctctcgagggcggcttcaaacgcagatcgaaatggtgcggcagacccggctgttgttgacacgtgtgtactttacgtgtgtgatcgcag

SEQ ID NO: 318 - DNA, 104 bp, Setaria italica
  source 1..104: mol_type = genomic DNA
tcccaggtaccggcgactcctcccctcggctcccccattcttcttgtggtcacacatgttcttgattttgccgtctgtttatattcccggcggcgcaggagctc

SEQ ID NO: 319 - DNA, 92 bp, Setaria italica
  source 1..92: mol_type = genomic DNA
gtaccggcgactcctcccctcggctcccccattcttcttgtggtcacacatgttcttgattttgccgtctgtttatattcccggcggcgcag

SEQ ID NO: 320 - DNA, 184 bp, Setaria italica
  source 1..184: mol_type = genomic DNA
gtaaggattgcttcagcgcaatcagtcaccgcttctccgtttgtttgggcgcttcgctccgtcaaaatgccgggccgcgcgcaaccatcgttgagcaaatttcgggagttccgatttgattgttcatagatgcttgctacctacgctgagagaggcccttcgttttgttgctgcttgtggtcag

SEQ ID NO: 321 - DNA, 531 bp, Setaria italica
  source 1..531: mol_type = genomic DNA
gtacgtttcacgggtctcattcccacctaatatgttttttttaacacgacttgaggggatatcgactggatttcatgtcgctgtggatgatattttggtcatatcaaatttctcgtctttgttcagtcaaatatggtcaaactggtggcgaaagcacatttcccttcttttaaaagaatacgtttcaaggaagatttgataaacagaatgaccaaattttcggtggcatactgaagaagagagagtccatcttagcacaaacaaaaaacattaataaaaaattggcactggtagtgaaatttctcaagcttgaattcatgtccggagataagttaatttatgacaggagggagtatacaggcacccagcttgtccatctgttctgctgtatctctgtacttatgaagatttttacaacttcccttacgaatttcctgaggagttgcctttggatctttatttcactaattattctgcctttatttattctccttgcttctaaacaaaacactaacacaagtaatcctgcag

SEQ ID NO: 322 - DNA, 333 bp, Setaria italica
  source 1..333: mol_type = genomic DNA
gtaagccccgcggaacaccaactagcgcccccttcttcagttcttctccctcctgcatctcgccgtattcctgtttctccgtctcgtgtgtgcgtgtgtgctttcgtggtgctcgagcatatgcccaacagtgtgtgagcattgcaattaattgtttctttctgatagtattcctttgtttgcaaagtgagcattgtactgcccttgactcattgctgcatttaatgggaactgaatgtgacacgttcaattgctggtttagtttaaggctctaagttgcagcatggacatgctagattctgaggttgtgtttgtgcgtggtgtttgttgcag

SEQ ID NO: 323 - DNA, 882 bp, Setaria italica
  source 1..882: mol_type = genomic DNA
gtgcgtaccgccccttccttccttcccccacttctttagtcgctcaggttcctcccagcgatttcctgccaagaacccccggggggccggtgccggttcttgaatacaattggcgcggtggtttgctattacattctgtagttcgccgtggggagacgaggctagccctggctaatttaagctgctcgccagtgtgtgtgcatacagccggcgggtaggtagtcatggggaaagtgcagagccagccagagcggtctccaattcgcggctgcctgcgcgttattcggctggtggtggatggtatgcrcagagggtgcgcgtgaattgaatttcacagtgtcaaaatgtgatcttggacggggttcgcgttattcggctggtggtggatggtacgcgcagagggtgcgcgcgaattgaatttcacagtgtgaaaatgtgatcttggacggggttttcccttgatgggctaccttccttttgcctgcgtgawgaatggggaattgacttttcttgctcgtccatcaatcatgcatgagctaaattatctggagtttggtgaccatgtgatttgcgaaggtcttgcatccaggttgccatttaacatgcttagggaattctacttcatttcttgttcctttttttgtttatatgtatttgtatgtgcctgtgaaagtcatttcttgcttgctattcagtgttcacagtgaactgtcagtttcatgttatgtctacttccgaataaaaggaaaacagttatttttcatgtaatttctgtataatcaataaattagcatgcaattgaatgtcttacattttgctttttcctgtgagaatgttcccccccttgtttaactctgtctggaacatgtttgactatttcag

SEQ ID NO: 324 - protein, 75 aa, Setaria italica
MAAAPPLSADALSFLPSAAAPAAAAPTPVVAAAWGAARAAGSVRGKAALRMARRGSGLAPVVGRRPRRPPLSVRC

SEQ ID NO: 325 - protein, 37 aa, Setaria italica
MAVHHLLRRGVSGGFPLHPLRGLLASQELGRRPLSSA

SEQ ID NO: 326 - protein, 63 aa, Setaria italica
MADRLAAAAATFRASAVAAPSARRGARASRAFLPNSSASPAGARVGLRAAPSRLPQKARAVRC

SEQ ID NO: 327 - protein, 74 aa, Setaria italica
MAERLAASLLPAASPSPSARRATVAASGSAAASFPSSCSARAGLRLRSSRSGSARFSKAAGRGGGGGALRVVRC

SEQ ID NO: 328 - protein, 76 aa, Setaria italica
MESLAAASVFSPSRVAAPAAGALVRAGAVVSAGMRRRSGRSGGMRCRAVTPLASAVMSRGAVAAKAAEEEKRRFFE

SEQ ID NO: 329 - protein, 45 aa, Setaria italica
MASLHLTGPRVAVAAKPAALGGLRLPTPSIAVPTGRRARGLVVRA

SEQ ID NO: 330 - protein, 42 aa, Setaria italica
MGALPVAHKLALTSPFLPRHRRPCPAAHHHGQRRRRHGVVVA

SEQ ID NO: 331 - protein, 102 aa, Setaria italica
MEVCCCSTSSSSSVLTVGHGGAARMLAAPAGRWGAAAGFGRAMVLAHQLPLPHPLPRRASSSRPSPRRARRGLIMAVFERFTERAVKAVVLSQREARGLGEA

SEQ ID NO: 332 - protein, 59 aa, Setaria italica
MELRLCLRLHARLPPATTPPPPPFAAPAVLPASRRIRTGGSYGVALRRPTRRSNPAIRA

SEQ ID NO: 333 - protein, 42 aa, Setaria italica
MAPALSGTLGASSVAALRPCAERRAPSAASSVAPRGSGAVRC

SEQ ID NO: 334 - protein, 57 aa, Setaria italica
MISPPMPTHLLPTRTISPRSNGCAATASPSPPSMAARPRRLPSGLQSVTGRGKFSLA

SEQ ID NO: 335 - protein, 44 aa, Setaria italica
MAASALHLRLLPSPPAGVKLQQRRLRSRILRQGGLSRRYSKVVC

SEQ ID NO: 336 - protein, 67 aa, Setaria italica
MQMQQTLTLRGVPSARRAAPPPASSAHLGSSPCLLRVPRSLRRRRPRSLRASASLEQEVKEVAASPA

SEQ ID NO: 337 - protein, 54 aa, Setaria italica
MPPTTMAWTSLFLPTTAGATAAATGSRHPSFSHRSHCRVPMTRLRRAPRLVVSA

SEQ ID NO: 338 - protein, 52 aa, Setaria italica
MARYLLAPTTTASSSSALLPKDAAKNLPPSRTLRLRALGSRSGKARPIMAVA

SEQ ID NO: 339 - protein, 75 aa, Setaria italica
MASTVAFSSVSAQAGLIQKPRNHGVTSHYGLKASSSSVSFGFESSFLGRNASLRASVAPRIVPKATSGSQISPQA

SEQ ID NO: 340 - protein, 44 aa, Setaria italica
MEAAAIGSQSPLSFPSSLCKAKVSSGLPICNVKVKNRRLEVVCH

SEQ ID NO: 341 - protein, 58 aa, Setaria italica
MLPMAVHPATTPALAPRARVAPPRPSTSLAAASSSSCSRIVGVKTRRLPLRSLRSVAA

SEQ ID NO: 342 - protein, 45 aa, Setaria italica
MAPTAMAATSVAPFQGLKSTAGLPVSRRSTSSGFGNVSNGGRIRC

SEQ ID NO: 343 - protein, 46 aa, Setaria italica
MAPTVMAAATSVAPFQGLKSTARLPVSRRSSSSGFGNVSNGGRIRC

SEQ ID NO: 344 - protein, 45 aa, Setaria italica
MAPTVMASSATSVAPFQGLKSTAGLPVSRRISSTGFVSNGGRIRC

SEQ ID NO: 345 - protein, 45 aa, Setaria italica
MAPTVMASSATSVAPFQGLKSTAGLPVSRRSISTGFVSNGGRIRC

SEQ ID NO: 346 - protein, 74 aa, Setaria italica
MAAMASRAAAATASLDLAAAPALSRRCHRPTSARPSAAAAAARGLRMRGAARVVVAAAAAAAAPAKAGAEEVVL

SEQ ID NO: 347 - protein, 44 aa, Setaria italica
MEAVLRHPSLSRLKPPNPNPHRTPPPSLASPSLLRLRERRLTVA

SEQ ID NO: 348 - protein, 94 aa, Setaria italica
MAAAATAAAASASFPAAAALCRDGRRPSRVSAAATTPAEAAALAAVPAPMVRVVPESLQRESGCLVAGFRERGAGAADGDGFGDAAPGGGGGPG

SEQ ID NO: 349 - protein, 67 aa, Setaria italica
MSEADRVRLRAAALALQDDGVRDKPDAKANVFADLGSPVSPLRPRASVATSSSSSSGSAKSPVPSNA

SEQ ID NO: 350 - protein, 75 aa, Setaria italica
  SITE 10: note = unsure at all Xaa locations
MAALATSQLXTTRAGFGLGDASSSMFRPGVQGLRGSRASSPAATLSVRTSARAAPRQQHRRAQRGARFPSLVVCA

SEQ ID NO: 351 - DNA, 537 bp, Setaria italica
  source 1..537: mol_type = unassigned DNA
aattctcagtccaaagcctcaacaaggtcagggtacagagtctccaaaccattagccaaaagctacaggagatcaatgaagaatcttcaatcaaagtaaactactgttccagcacatgcatcatggtcagtaagtttcagaaaaagacatccaccgaagacttaaagttagtgggcatctttgaaagtaatcttgtcaacatcgagcagctggcttgtggggaccagacaaaaaaggaatggtgcagaattgttaggcgcacctaccaaaagcatctttgcctttattgcaaagataaagcagattcctctagtacaagtggggaacaaaataacgtggaaaagagctgtcctgacagcccactcactaatgcgtatgacgaacgcagtgacgaccacaaaagaattagcttgagctcaggatttagcagcattccagattgggttcaatcaacaaggtacgagccatatcactttattcaaattggtatcgccaaaaccaagaaggaactcccatcctcaaaggtttgtaaggaag

SEQ ID NO: 352 - DNA, 1438 bp, Setaria italica
  source 1..1438: mol_type = genomic DNA
cctcttcctttatttttgccatcagcgtcgttgttgaactctcgtgcctgttaaagatgtgtgtgttccgctctttccaaatttcccatataatgagtagagtgagactttgcatagccttgcgcggtaagtccagtattgtagttatagaagtccatcattccaatgcattggatgagggttgccatgcagttggtctgatgcttggctgcgctaaccatgttgccgttaaatcccatatcctccttgtgttcctgcacttagcctagatgtggtgactagtttccatggtttgtctgcatagggtgcaagtggcgttgtatggccatccacgtttagcctgcctatccacggaccaaactcagttttgtgtaattagccgcaagaagaatttgcattttgccggcgcccacgttttccagacagaagagatttctggtgtttcgatgcagcccaggaactgtgctttatatgccgatgctattgtatacatgacggatcttgttagtttctagaagatagtatcctcttccacttatcgaagctcctgaccatagcccatagggcgaacgatgctagatgctaaatgtgaagtggtgatgctgttgtcgatattgaggtcacagatccagttgttactgatagcatcgtgaactgtcctattttgtcttcttgaaatgtcgaagaggagtggagcaatgtccttaggtgctggccatgtagctagccagaagtccagaagctagcctttttgccatcaccaagagtgataaccatgcaggcaacaaatacttgcatgtctgtctcgtcgcatgggatttctatgttggtccagggtttttccggtgatgcctactcatgccaaagccacctcagacggagggctcgtgcgaatttctcgaggtcagcccctcgtattgcttcagtaggcaggttttcgtccagttgactttacatttaccctcggttagctgttggtctcccgctcagaggaattttttacggatcttgtctaagtcttggagcccctctttaaggaaataataaaagaagaaactacttgtttttgcaatgataacgtacatacagatatttctaaagccatcaagtacctagcttgtctaaataacaagtgtgtcctggaacaagtatcgagtacctgaaagcaacctgctttgaattggaaaggataaaaattcgacaaggaacgaacaaaggaggcacatttcttgccggccagaaactattgggtctttgcatccttgtgaattgataaacgtgctggtgtgtttcaatgatgtccatgagatgggaatacaaagtcaagcacgccttattaccttattgtgtggctctgtctgcagaaagcaaccgggcgcattttcttccgataccgtggttactttcaaattggaagacagagacgtacacacaaggc

SEQ ID NO: 353 - DNA, 322 bp, Setaria italica
  source 1..322: mol_type = genomic DNA
atcaattcactctgaaaccaatttccaggcatgggcctcatctattgctagctccaccgactgctaaagtggactagcttccaaactactccatctttcttctgcaaaagtatgtcaaacagcgtatacatcatggaacatattggtaaattaaacttcaccagttccgatcatgcatgcagctgcaggttcccagcctgttgcctgttggcaccttttctgctctaataattttggaatggaaccaacccctatgatatttcttctccatctatatatttcggggttagcttgcatgctatccgacagagactaagttgag

SEQ ID NO: 354 - DNA, 320 bp, Setaria italica
  source 1..320: mol_type = genomic DNA
caattcactctgaaaccaatttccaggcatgggcctcatctattgctagctccaccgactgctaaagtggactagcttccaaactactccatctttcttctgcaaaagtatgtcaaacagcgtatacatcatggaacatattggtaaattaaacttcaccagttccgatcatgcatgcagctgcaggttcccagcctgttgcctgttggcaccttttctgctctaataattttggaatggaaccaacccctatgatatttcttctccatctatatatttcggggttagcttgcatgctatccgacagagactaagttgag

SEQ ID NO: 355 - DNA, 1422 bp, Setaria italica
  source 1..1422: mol_type = genomic DNA
ctgtgccatacccgagtggccattatataaatgtaaacttgattgacgaaataattcaggcacaagctggaaaaatattatttaaattttttttcgatcaatcagggcatcaggtacaaaagctggacagtgtgatcgaaaaggcaacacctggaatggggtgttcgttcggttgggtgagcgcagcaggcccaaaagccgacccaagcaacatccagcgaagaaccagttggacttggaccgaccgattggcgggcgcgcacgtactgatgctgcggggcccactaggcagatcggacggcgggtgcgtcctccgcgtcgcccatcgtgcggtccaggttgtctcagcatctccagctcattccagcctcaggcggctctttggggggcctctatttattttctctctccttttttcgactcgctctcatttttctccatttctttttctttggtcccggaccacaggtacttccagtggaaggaatataattgtagttttctattgtgtaaatagcattgtctctgatacacaatagacatgaaataccttggtgccagggttctcactcttctggttatgttgtttgattcttgatccaaactcaagatgctgaactgaaatcataaaatttcatcctttacaaattaccctaaaggagttgttttcattttgccttcaattaaagttcttcgccttcaacggtgtggtttgttggaagttagaagcattggcttcgtggcatggacctacttgcaaataatttcctcccaattaaaagtttttttttgcaaataatgcctcttttgatgccatcgccttttctagcccgtgacaaccggagttcaggagatgcataactgtctttgagatccccttttatttatttttatttgattgcaaactaattttagttggcactagccaggatgggctaaataattcttgagatgttggcctaaataattttcagaaatgaagtgtcctccaccgtcttccatgacaaaaaaaaatacttccatgtkggactacaktctaaaaaaagaccagagctgtaacatgatgattaaaaaaaagaagaacatttgagacytctgtttcatgctgaattatmccttgtttttttccattcttgttaccgtggtcaaaaaggaaatgttagatactaactgataactgaaaaatagatgcatatccttaaaaaagatctccatttggaaaaaatatgataaacacgaaattcgtagacgccgaacatctgaaatattattcaattttttgggggaaaaaaatacacgcctcgtatttcaaaccgtatctgtgtcacggaccacgcatcaatcgagtccacgtaccacccatcccttcccctccccttcccccccgctcttgtataaactccaccaccccagtcctcgggg

SEQ ID NO: 356 - DNA, 1420 bp, Setaria italica
  source 1..1420: mol_type = genomic DNA
ctgtgccatacccgagtggccattatataaatgtaaacttgattgacgaaataattcaggcacaagctggaaaaatattatttaaattttttttcgatcaatcagggcatcaggtacaaaagctggacagtgtgatcgaaaaggcaacacctggaatggggtgttcgttcggttgggtgagcgcagcaggcccaaaagccgacccaagcaacatccagcgaagaaccagttggacttggaccgaccgattggcgggcgcgcacgtactgatgctgcggggcccactaggcagatcggacggcgggtgcgtcctccgcgtcgcccatcgtgcggtccaggttgtctcagcatctccagctcattccagcctcaggcggctctttggggggcctctatttattttctctctccttttttcgactcgctctcatttttctccatttctttttctttggtcccggaccacaggtacttccagtggaaggaatataattgtagttttctattgtgtaaatagcattgtctctgatacacaatagacatgaaataccttggtgccagggttctcactcttctggttatgttgtttgattcttgatccaaactcaagatgctgaactgaaatcataaaatttcatcctttacaaattaccctaaaggagttgttttcattttgccttcaattaaagttcttcgccttcaacggtgtggtttgttggaagttagaagcattggcttcgtggcatggacctacttgcaaataatttcctcccaattaaaagtttttttttgcaaataatgcctcttttgatgccatcgccttttctagcccgtgacaaccggagttcaggagatgcataactgtctttgagatccccttttatttatttttatttgattgcaaactaattttagttggcactagccaggatgggctaaataattcttgagatgttggcctaaataattttcagaaatgaagtgtcctccacgtctccatgacaaaaaaaaaatactccatgttggactacagtctaaaaaaagaacagagctgtaacatgatgattaaaaaaaagaagaacatttgagacctctgtttcatgctgaaattataccttgtttttttccattcttgttaccgtggtcaaaaggaaatgttagatactaactgataactgaaaaatagatgcatatccttaaaaaagatctccatttggaaaaaatatgataaacacgaaattcgtagacgccgaacatctgaaatattattcaattttttgggggaaaaaaatacacgcctcgtatttcaaaccgtatctgtgtcacggaccacgcatcaatcgagtccacgtaccacccatcccttcccctccccttcccccccgctcttgtataaactccaccaccccagtcctcgggg

SEQ ID NO: 357 - DNA, 1422 bp, Setaria italica
  source 1..1422: mol_type = genomic DNA
tgtgccatacccgagtggccattatataaatgtaaacttgattgacgaaataattcaggcacaagctggaaaaatattatttaaattttttttcgatcaatcagggcatcaggtacaaaagctggacagtgtgatcgaaaaggcaacacctggaatggggtgttcgttcggttgggtgagcgcagcaggcccaaaagccgacccaagcaacatccagcgaagaaccagttggacttggaccgaccgattggcgggcgcgcacgtactgatgctgcggggcccactaggcagatcggacggcgggtgcgtcctccgcgtcgcccatcgtgcggtccaggttgtctcagcatctccagctcattccagcctcaggcggctctttggggggcctctatttattttctctctccttttttcgactcgctctcatttttctccatttctttttctttggtcccggaccacaggtacttccagtggaaggaatataattgtagttttctattgtgtaaatagcattgtctctgatacacaatagacatgaaataccttggtgccagggttctcactcttctggttatgttgtttgattcttgatccaaactcaagatgctgaactgaaatcataaaatttcatcctttacaaattaccctaaaggagttgttttcattttgccttcaattaaagttcttcgccttcaacggtgtggtttgttggaagttagaagcattggcttcgtggcatggacctacttgcaaataatttcctcccaattaaaagtttttttttgcaaataatgcctcttttgatgccatcgccttttctagcccgtgacaaccggagttcaggagatgcataactgtctttgagatccccttttatttatttttatttgattgcaaactaattttagttggcactagccaggatgggctaaataattcttgagatgttggcctaaataattttcagaaatgaagtgtcctccaccgtcttccatgacaaaaaaaaatacttccatgtkggactacaktctaaaaaaagaccagagctgtaacatgatgattaaaaaaaagaagaacatttgagacytctgtttcatgctgaawttatmccttgtttttttccattcttgttaccgtggtcaaaaaggaaatgttagatactaactgataactgaaaaatagatgcatatccttaaaaaagatctccatttggaaaaaatatgataaacacgaaattcgtagacgccgaacatctgaaatattattcaattttttgggggaaaaaaatacacgcctcgtatttcaaaccgtatctgtgtcacggaccacgcatcaatcgagtccacgtaccacccatcccttcccctccccttcccccccgctcttgtataaactccaccaccccagtcctcgggg

SEQ ID NO: 358 - DNA, 905 bp, Setaria italica
  source 1..905: mol_type = genomic DNA
attgtctctgatacacaatagacatgaaataccttggtgccagggttctcactcttctggttatgttgtttgattcttgatccaaactcaagatgctgaactgaaatcataaaatttcatcctttacaaattaccctaaaggagttgttttcattttgccttcaattaaagttcttcgccttcaacggtgtggtttgttggaagttagaagcattggcttcgtggcatggacctacttgcaaataatttcctcccaattaaaagtttttttttgcaaataatgcctcttttgatgccatcgccttttctagcccgtgacaaccggagttcaggagatgcataactgtctttgagatccccttttatttatttttatttgattgcaaactaattttagttggcactagccaggatgggctaaataattcttgagatgttggcctaaataattttcagaaatgaagtgtcctccaccgtcttccatgacaaaaaaaaatacttccatgtkggactacaktctaaaaaaagaccagagctgtaacatgatgattaaaaaaaagaagaacatttgagacytctgtttcatgctgaawttatmccttgtttttttccattcttgttaccgtggtcaaaaaggaaatgttagatactaactgataactgaaaaatagatgcatatccttaaaaaagatctccatttggaaaaaatatgataaacacgaaattcgtagacgccgaacatctgaaatattattcaattttttgggggaaaaaaatacacgcctcgtatttcaaaccgtatctgtgtcacggaccacgcatcaatcgagtccacgtaccacccatcccttcccctccccttcccccccgctcttgtataaactccaccaccccagtcctcgggg

SEQ ID NO: 359 - DNA, 901 bp, Setaria italica
  source 1..901: mol_type = genomic DNA
ttgtctctgatacacaatagacatgaaataccttggtgccagggttctcactcttctggttatgttgtttgattcttgatccaaactcaagatgctgaactgaaatcataaaatttcatcctttacaaattaccctaaaggagttgttttcattttgccttcaattaaagttcttcgccttcaacggtgtggtttgttggaagttagaagcattggcttcgtggcatggacctacttgcaaataatttcctcccaattaaaagtttttttttgcaaataatgcctcttttgatgccatcgccttttctagcccgtgacaaccggagttcaggagatgcataactgtctttgagatccccttttatttatttttatttgattgcaaactaattttagttggcactagccaggatgggctaaataattcttgagatgttggcctaaataattttcagaaatgaagtgtcctccacgtctccatgacaaaaaaaaaatactccatgttggactacagtctaaaaaaagaacagagctgtaacatgatgattaaaaaaaagaagaacatttgagacctctgtttcatgctgaaattataccttgtttttttccattcttgttaccgtggtcaaaaggaaatgttagatactaactgataactgaaaaatagatgcatatccttaaaaaagatctccatttggaaaaaatatgataaacacgaaattcgtagacgccgaacatctgaaatattattcaattttttgggggaaaaaaatacacgcctcgtatttcaaaccgtatctgtgtcacggaccacgcatcaatcgagtccacgtaccacccatcccttcccctccccttcccccccgctcttgtataaactccaccaccccagtcctcgggg

SEQ ID NO: 360 - DNA, 721 bp, Setaria italica
  source 1..721: mol_type = genomic DNA
aaattgattttcaaaatctgaattctaggcaaaatttgaatggacttgtttggattcatggatttcaaaatctgattccatggttgtttctttgatacatgccttttttgcccggcgtccagcgccacgtccgtcggaggatgccaccaggggaagctcggggctggctgaagaaatcgagctccagattggtcgctgtggtgttaagactcccgacagaattgccgaggtcccctcgcgaatccatcgatggccagcagccgcgcctgctgattccgctggatccggcgtcggcggccaagcctcgctccgattaggcgagcggcgactatgggcgggcctggtacagtgaacaagcggggcctgctactggggacgagatgctaggaggcggcgcaaggagcgtgcgcgcgatggggagggatgggaaggaggcggtggcggcgggattctgcgagcgacgcaggaggggacggagcacgggaaagatcgaggctttctgtgcgggaacgggaagaaaggggaagaccggagaatggtagaatcggggccttaaacagagcaacacgagaccttcaatcgacgggagatgcggcggcgttcgccggcacaaaggcacggcggagcctgcgctgtccgccgtgcacgctgtggccgagagacggcttgctgtttctttctgttgttgcgggtgatcgaacaagccacctatttcctgtcc

SEQ ID NO: 361 - DNA, 898 bp, Setaria italica
  source 1..898: mol_type = genomic DNA
ctatttgggttataccatcgacatacatgcgcgtgcttgttcaaccccaatagcacaatcaatctatatatgctgaagaaaaggagttcatgggcttgtcggctttcgcttcttaatacatggcacaaatgtcgtaaaaggcccttagctcagagaagggtagtgtattggcccacattatgttcatcattgggccatgaatcgtacgattcacttggctcccccgctccttattcgaaaaagaattgattttgatgcactagtaaggtgattatcattttgatgaaatgattccattgggactccaactaatgcgtactgaccgcagctaatactttgtatgccaatgacatgcaacatgtaacaagtacgttgcttaatttgttattggactccaactaatgcgtactgaccgcagctacatgttggatcaggccatcatctccaatgccaacgcggactccttgaagttaaaaggctatatcgttggattcttcagaaactactcaaggaatgggattgatgtcgaaagattttatagtatataagaattactagtcataggtctaaaaaaattctttttattgtccatctaagcccacttaaaattgtttttgtaaaagtatatgaaagatgcatattcccgggagaatcatcaaagaatagtggcttcatcctctgggttttcttttgttcatccatgattcatagattatttttattgtcctatgaacttgtataccaactacttcgacctcaaccagcaggtcctgtactcattagtcatcgccactgacctctagccgccggatgacctataccctgacgcatcattggcctatcaactgcaatataaattgaggcaccaataagcccacttcactcaacactcaaacta

SEQ ID NO: 362 - DNA, 2352 bp, Setaria italica
  source 1..2352: mol_type = genomic DNA
cctagctgacactaactttatcgcttggaagacaagcctcagagcataacccttaatttcagtatccagtggttatttatccgtattgtgcattaagtttctaggtgttgattcaaaccttagatgcatgatccctaggtttccttgttgatctactagtatgtgtaggtcattagtactaccatgcttaattaggttttggtagaagtctagtgattttctatcactcgcgagatacaagatcttttgatacttttaacaaaggttacttgagaatgaatcactgaggaaagaaaattagagaccgggcggagatgagtttggttaaggatatgaagtggattgaaagtaaacctctgcctatgttcattaaggcccgaaccgttgttggctgtgctgatcggggattgaacagtactaacgacatgccgggagtaggaggtagtcgaaaccagcaaaccttcgtaccttggtgcgcgctaacaacttgagcttgatcctgacttcagcatcgggtactattctataactcatggctgaccctacggggtatcgacggggactagtgcttgagggtcatggggcaattcaaatgttagcgttcgccaagagaatggttgccatgcgcagctcgacggggcattgcgtgtgttgtgtgattagatttaccttgcaagggataaaatcggatcaattcaccatatctctcggataagagaactttgatcacttggtcacgtgtagtaatggaaatggaatggtgatgacatgagatatgtttatgatattctttgatgattagtgttgtataacatgctagctctggttagttatgcaaacctagttggtacttgctacatattaaacccaagctaaaatattgaaagtaaggatctagtaagcttctttttgcaaaagaaacccaaaaaactagaactgagtcatctaagtatttaccacagtcgagtaaaacttgttgagtattagtatactcagagttgttgttgtgatcctgtttcatgtggtattacattcatgtcatgacacatcggtaggctcattgtgttgtcctctgctcgttgtcgttgatagtttatcttctagcttagctttggcaatggttttcaagtttctttccgctgtgcattttaaagctctgtattatttttatatttgaactctatttgtaaagctaattgttataccttaatttgtatagtgtttgtattatctctgctcaccttcgtgtgtgacttgtggtgtattgtttcgatcgagatatcagtggttgaatcaggcttgaccagacagactgttagattacactgttttaagtgtgtactgaccgaatcaaccattaagaggatggttagcgcactggtttaatctgggctattctaccacagtatgaaactggttaatgattttgtctacgtagattcatccccgtctatctatttgggttataccatcgacatacatgcgcgtgcttgttcaaccccaatagcacaatcaatctatatatgctgaagaaaaggagttcatgggcttgtcggctttcgcttcttaatacatggcacaaatgtcgtaaaaggcccttagctcagagaagggtagtgtattggcccacattatgttcatcattgggccatgaatcgtacgattcacttggctcccccgctccttattcgaaaaagaattgattttgatgcactagtaaggtgattatcattttgatgaaatgattccattgggactccaactaatgcgtactgaccgcagctaatactttgtatgccaatgacatgcaacatgtaacaagtacgttgcttaatttgttattggactccaactaatgcgtactgaccgcagctacatgttggatcaggccatcatctccaatgccaacgcggactccttgaagttaaaaggctatatcgttggattcttcagaaactactcaaggaatgggattgatgtcgaaagattttatagtatataagaattactagtcataggtctaaaaaaattctttttattgtccatctaagcccacttaaaattgtttttgtaaaagtatatgaaagatgcatattcccgggagaatcatcaaagaatagtggcttcatcctctgggttttcttttgttcatccatgattcatagattatttttattgtcctatgaacttgtataccaactacttcgacctcaaccagcaggtcctgtactcattagtcatcgccactgacctctagccgccggatgacctataccctgacgcatcattggcctatcaactgcaatataaattgaggcaccaataagcccacttcactcaacactcaaacta

SEQ ID NO: 363 - DNA, 2348 bp, Setaria italica; identical to SEQ ID NO: 27
  source 1..2348: mol_type = genomic DNA

SEQ ID NO: 364 - DNA, 1632 bp, Setaria italica
  source 1..1632: mol_type = genomic DNA
actgcgcgtggcacgaaggttatcaaattaaagcctagcattgcacaatcgccaaggatcgcaaaacaatcctcctcctcatctgaggagctgtagctgtcctcatcgtcgtcctcctcatccgatgagtagtcactgtcgtggtcatcttcctcctcatctgacgagcagtcgctgccatcatcgttgtcatcttcctcttcgtctgatgatgagtagtcactgtcgtcaccatcatcttcctcatccgaagagcagtcgctgatgtcgttgtcgtcataatcttcctcctcatccgacgtgtagtcgtcgctgccatcgtcatcggacgaagacgaagactcagtctccggctcgagtatcccttcgagtttcttcagtacccgttcaatggctgcctgtaagcctgccttctgcctgacccaatcgtcgtctacctcgacatagccctccttggcctccatctctttgcgcacgcacttctgcaacttctgatagccctcctccgtctgacagaacgcgttggccctgaattagaagaggtcaggtagccgtcggcgtcaggccggggttgctcgtctctgctaatattgcagtgcatctaggcaggagtccgaattgaactcagagtcctcgatcgatccggattggcgttaaagcacggattagggtaggtttgcaggttatgtggtctgcagatttcttcctttcagagtttgttacggacttctgagtgcaatatatggccgtgctggggtacggtgttgggtcggatcggactgtgggctgaaattgggagcaggtcgaaccgaaaaaaaatagagaagaaaaggattttgtggggctatagatggctagtgagtagtgactgattcttatgtccttcgaaacttggaggggctcatatacatgttgtggtaaaactagcaaaaaacaaaatggagagagagcgagcgagcgagatgacacaaattgaacaatgcagagtctactcaatgttcttcctcctttgggtcggatttctatgaagcaatgttcatgttttttcacgcgacccggatcctatatttcctttttctcttttttcctaggaattggtgggatttgcccaacttgatcatctcacaatattgacctagaatgtctcttgcagtgtaatgctcatcattggtgcaaagcattctagcaggtgagaaaacatgaacgactcaatgacatccatgaggattggctcatggaacaaatcctatccgagtcagatgaacaatgaagctcaaaatgatttggatccacatcagcaaatcacagctttacaaaccaactttaacaaagtggaacacatatttttgtggctaagactttcacgtgtttaaaggtgaaccgaccatgatgttgtcacaaagacaataccaacagaagaagacacttttttgcttgtacaacggcaagttgtcttgccaacacatacattacaacacaagggtatttatcactaaatgccaaaattgactagataccatgtcatctccagtttatcaagctagcgatttgcaaggcacaagcaaaaatcttgctaaagctacatgagctctcatgcctataaatacgccccaaatgttgtgtaggtattcc

SEQ ID NO: 365 - DNA, 1722 bp, Setaria italica
  source 1..1722: mol_type = genomic DNA
aggaacaagggagataacttcaaacatgtcatcttttccttctttttttagcaagaacagtaggggaaaccctactgcggtaaagaaagttgtccaaaagggagaggaaaaaattaacgaagggcattaaggcatgctaaggaaaaataaacttctagtagatagttcctttactgagcctgaagtaaaatgtcattggtaaatcctttctgccaagaagagaagctcggtctattgcttttgctactaatacagcttgcattgtactaattaattaaccttgtgatctgtctcccttatcatgatcaccacgtgcacatagtgattagtccatgcccgaatttgtcaaagtcgttacgaaaatctcgaggtcgcctctgcaatgtcaaccactgcaagaggaataagaattgtttgggtgctcagcgtatgcctgtgctgatcttcaaacaagcagttcagacttaatgcaggttgttatttactagcttcactgttagtataatgctagtatctgacaacaaaagataaaccctggggtttaattactatgggcgatctcgttatcttttgattgttgtctcaccagctgtacatgtttcacagtgctggagagaatggtcaaatgcatacagtgtaaggaatgaaatggcatgagcatgcatatttaagcgtattgtcatatgcataaattttgcaggtttttcaaccaaacaatttattccaagagaaagccaagacaaaatctcatgttccaaagggagcacaaaatccttgcgaaagtaagacacttgcttttgttctcaggtcgggtaaaatagagtatgtgttaagagtttggaagtttctagtatatactttacagatctgtatggtctatctttggagctctgctggcgccaagcacttgtgtctgcttggatggccaatggcaggaagcctgctacacgtttagtctctctggtctctcctccttcctatctggttgttgttgtttcttactaggaacaatcttgtgagcctttgatccgtatacgtgcgcccggttggcccgcgttgtaactaaacgttcttcgttatatcttcttaatacaaagatacgcagctctcctgcgtattctcgaaaaaaaaataaagatctgtatggtccttatccaagaaccctataaatgcacagatcaaggagagacacaacatgtaagtaaatttcaagcgatagtttatggaacgggacctagcttcacctattagacaaatcagtctggtgccaaaatcttttgctgatttagtagcagtgacaagtacaaaaaactgaaaaaacttgataaataacttcactattaacacttagaatggagcaagcagctaggtttagtttgaatgggtcttccaaacaccaatgaccatgtcaaatgctaaaactttgtgccatcaataatatatggagatgactttaagaagctagcacttaggagatcatctagagaggagagcatagcgagtactagtgagaagaaaattcgtaaattgtggccacttctcttcttgcatgtactcaatggtcaagtcaagaagctccattaattccattggctttaaaagcctccacttggtctcctatgggaacacactgccgttaacttgcatgatattaagataaagaaccactacgtggcctccagcactataaatacccatgcagccttcacttggaactcatca

SEQ ID NO: 366 - DNA, 1721 bp, Setaria italica
  source 1..1721: mol_type = genomic DNA
ggaacaagggagataacttcaaacatgtcatcttttccttctttttttagcaagaacagtaggggaaaccctactgcggtaaagaaagttgtccaaaagggagaggaaaaaattaacgaagggcattaaggcatgctaaggaaaaataaacttctagtagatagttcctttactgagcctgaagtaaaatgtcattggtaaatcctttctgccaagaagagaagctcggtctattgcttttgctactaatacagcttgcattgtactaattaattaaccttgtgatctgtctcccttatcatgatcaccacgtgcacatagtgattagtccatgcccgaatttgtcaaagtcgttacgaaaatctcgaggtcgcctctgcaatgtcaaccactgcaagaggaataagaattgtttgggtgctcagcgtatgcctgtgctgatcttcaaacaagcagttcagacttaatgcaggttgttatttactagcttcactgttagtataatgctagtatctgacaacaaaagataaaccctggggtttaattactatgggcgatctcgttatcttttgattgttgtctcaccagctgtacatgtttcacagtgctggagagaatggtcaaatgcatacagtgtaaggaatgaaatggcatgagcatgcatatttaagcgtattgtcatatgcataaattttgcaggtttttcaaccaaacaatttattccaagagaaagccaagacaaaatctcatgttccaaagggagcacaaaatccttgcgaaagtaagacacttgcttttgttctcaggtcgggtaaaatagagtatgtgttaagagtttggaagtttctagtatatactttacagatctgtatggtctatctttggagctctgctggcgccaagcacttgtgtctgcttggatggccaatggcaggaagcctgctacacgtttagtctctctggtctctcctccttcctatctggttgttgttgtttcttactaggaacaatcttgtgagcctttgatccgtatacgtgcgcccggttggcccgcgttgtaactaaacgttcttcgttatatcttcttaatacaaagatacgcagctctcctgcgtattctcgaaaaaaaaataaagatctgtatggtccttatccaagaaccctataaatgcacagatcaaggagagacacaacatgtaagtaaatttcaagcgatagtttatggaacgggacctagcttcacctattagacaaatcagtctggtgccaaaatcttttgctgatttagtagcagtgacaagtacaaaaaactgaaaaaacttgataaataacttcactattaacacttagaatggagcaagcagctaggtttagtttgaatgggtcttccaaacaccaatgaccatgtcaaatgctaaaactttgtgccatcaataatatatggagatgactttaagaagctagcacttaggagatcatctagagaggagagcatagcgagtactagtgagaagaaaattcgtaaattgtggccacttctcttcttgcatgtactcaatggtcaagtcaagaagctccattaattccattggctttaaaagcctccacttggtctcctatgggaacacactgccgttaacttgcatgatattaagataaagaaccactacgtggcctccagcactataaatacccatgcagccttcacttggaactcatca

SEQ ID NO: 367 - DNA, 976 bp, Setaria italica
  source 1..976: mol_type = genomic DNA
tctcatgttccaaagggagcacaaaatccttgcgaaagtaagacacttgcttttgttctcaggtcgggtaaaatagagtatgtgttaagagtttggaagtttctagtatatactttacagatctgtatggtctatctttggagctctgctggcgccaagcacttgtgtctgcttggatggccaatggcaggaagcctgctacacgtttagtctctctggtctctcctccttcctatctggttgttgttgtttcttactaggaacaatcttgtgagcctttgatccgtatacgtgcgcccggttggcccgcgttgtaactaaacgttcttcgttatatcttcttaatacaaagatacgcagctctcctgcgtattctcgaaaaaaaataaagatctgtatggtccttatccaagaaccctataaatgcacagatcaaggagagacacaacatgtaagtaaatttcaagcgatagtttatggaacgggacctagcttcacctattagacaaatcagtctggtgccaaaatcttttgctgatttagtagcagtgacaagtacaaaaaactgaaaaaacttgataaataacttcactattaacacttagaatggagcaagcagctaggtttagtttgaatgggtcttccaaacaccaatgaccatgtcaaatgctaaaactttgtgccatcaataatatatggagatgactttaagaagctagcacttaggagatcatctagagaggagagcatagcgagtactagtgagaagaaaattcgtaaattgtggccacttctcttcttgcatgtactcaatggtcaagtcaagaagctccattaattccattggctttaaaagcctccacttggtctcctatgggaacacactgccgttaacttgcatgatattaagataaagaaccactacgtggcctccagcactataaatacccatgcagccttcacttggaactcatca

SEQ ID NO: 368 - DNA, 3010 bp, Setaria italica
  source 1..3010: mol_type = genomic DNA
actgatatatgcttctgtgtggtatggtcatggacacaatattacatgcttttatttggagtgtttacttaatgggttccatgctatcatatagtctttctatttatatgaagaagtatggtcttaatttctggagtgcttatcctaaagctgtaatttcacatcatcacagaaggatatgcagaatatttcttcttaaattgaaacaacattgattcctagatatgtaacggtcaggttgagtttatggtagtaacttgttggcatggtgatgcagcagaagcatatctttgatcaaaaatattttcttactaggtgtgctctagagctaaattctaaaatctatattgtgaacatcatgtcttctactgagagctcatatcagcccatcagctgccagtgttcgctagaactgtaaagctattatccaatagctctgattgcgttctcttttatctgtgcattctctaggccgtgacaaaatcagaacctccagaaaaggcattaagtagtgatgcacaaccaactcaagttattactgagctccgaaggagctatactagtaaattggaagaggtatgcttctatggaaacataattttttttaatctgtgttaattctgattctttactcaacatgcatttttgcattttctgtgcatctttcagtcagagaagcggaaacaggaattgttagctcaattggccgcagaagaacaacatggtcatgagctcacaaaaatagttagagaactgctacctactcctaagaagactgcaaatctacaaaggcagccgcggcacagaagggtaaacttgcttggttgccgttgtttccagttactacccacggattaaaaatttgatgtgaattttcttccagaggagcaatgatagatcaaaggtgtcaaaacgacttactgaagaggccgagcaatactttgaagatttcctatcaaacgttgaagacaccgacttttcatcttttgatggagaaagaagtgacacaagttcaacaaggaaagatgtgttacatcatgctatgatggaaactccagtggctctcccgaaagttgcttcacctgctgaggcagatggcgttgtccttccttggctgcaatgggaaactgccaatgatcttcaaacctccccatgcaaaaccaaggctgaggtaacgatgacaccattttctatagaagtagtaatatgtttcttattcttaaaatgtagaatattacacattactcttaaatggaaaggatgttttgtgaaatggctgagctaatattttcaacattaatgccaccaacatgttaccttttctctgattgcatggcgaattgatcattttcagggagaaagcatggcatgcagcactagcaatcagactgtgagcagccgtgggagctggagccctggagactactccacttcaactgcctctaaagataaactgctggccaggtttgaggaggtcgggattcgccaaagcagctgccctcattttgctggaacctcgtcatttcacattgacgactatctgcatctgcggcagagtgaggacctcctctttgagaagtggaggcagaagcaaagaatcgagtctggcggcctgttcctgtgcagtagaccgacaatattgtagattatggccaattatttatcggcctggtcctggcaggatgagtgtagtagtgtacctaatttggtaggcaatgggtttgagttaggccaataaatgtgcaggtttacatttggttgccatgttagttcataacttcatacacttccatttttgtacgtcggcgatgtttcaaccagaacagattatgtttccttgggactgtaaatttcttcatcgctccatcccaatgaacttgcaagagattcgtgttagcaaccaaaattgctctgtccttcccaaaaagcattgcctctggatcttttccgatcaagatcagaaaccctatatgtattgttcttatgttctgctgtgggtcgttggttcttgtcacccttaaacttctctgtttggtacccagataaatacaaattcggctggtgggtagaaaaaccgcctacgaacactggtttcaccttataagactactgcactgtttctagcaggcttatttttctcttcgttttttatattccaatgtatacatattaatgtttatcgagctatgatcttataaatttgtacatgcttcaatattttctaaaaacttgaataacagtatgtaaaacctaggttgatgtttcaaatgaacttatttaacattttacgttgaaacagtacatcgcgaatggcatattattttgttgcatttattctaaacaccttaaaatggaatttgaaaacgggctctaagtttgagagaagtttaagggtaatagtattctaaacacttcaagtttgagatccaaaataattaatctctcacctatcacctccaatcaagttgtttatcagtttatgccatgtacatgtatcgctggtttgttatttcacctcattttcgctatgtatctactactattgcgctaatctcaaatattagatgacatgtaaactaaaatctttggaaagattaataggatacccgcgggtgctgatatctgtttctaaaaatgttgaatctaactatttgtaaatattgatatatttttcagaaatgttggatttagtcttgtgaaatgttgaaccgatatctctgatatggatttaatgggcttaaagcttccactagccgtgtgcatgggcgaaaaaaaatcttggccaagtgttactccgtcgcggccacacgccacaagtcctcccggccctcgctcgccccttatcccatcgtacccgccacacggcgcgccaccagtggcgccgcggatgcgcctcatctccccggcggccacctcgcgcggtttagatttccctgggcccccctcgcggtaccgtcacatatttttggcgcctcttcttctgcgcccctctcctcccgaaccgcagata

SEQ ID NO: 369 - DNA, 3016 bp, Setaria italica
  source 1..3016: mol_type = genomic DNA
actgatatatgcttctgtgtggtatggtcatggacacaatattacatgcttttatttggagtgtttacttaatgggttccatgctatcatatagtctttctatttatatgaagaagtatggtcttaatttctggagtgcttatcctaaagctgtaatttcacatcatcacagaaggatatgcagaatatttcttcttaaattgaaacaacattgattcctagatatgtaacggtcaggttgagtttatggtagtaacttgttggcatggtgatgcagcagaagcatatctttgatcaaaaatattttcttactaggtgtgctctagagctaaattctaaaatctatattgtgaacatcatgtcttctactgagagctcatatcagcccatcagctgccagtgttcgctagaactgtaaagctattatccaatagctctgattgcgttctcttttatctgtgcattctctaggccgtgacaaaatcagaacctccagaaaaggcattaagtagtgatgcacaaccaactcaagttattactgagctccgaaggagctatactagtaaattggaagaggtatgcttctatggaaacataattttttttaatctgtgttaattctgattctttactcaacatgcatttttgcattttctgtgcatctttcagtcagagaagcggaaacaggaattgttagctcaattggccgcagaagaacaacatggtcatgagctcacaaaaatagttagagaactgctacctactcctaagaagactgcaaatctacaaaggcagccgcggcacagaagggtaaacttgcttggttgccgttgtttccagttactacccacggattaaaaatttgatgtgaattttcttccagaggagcaatgatagatcaaaggtgtcaaaacgacttactgaagaggccgagcaatactttgaagatttcctatcaaacgttgaagacaccgacttttcatcttttgatggagaaagaagtgacacaagttcaacaaggaaagatgtgttacatcatgctatgatggaaactccagtggctctcccgaaagttgcttcacctgctgaggcagatggcgttgtccttccttggctgcaatgggaaactgccaatgatcttcaaacctccccatgcaaaaccaaggctgaggtaacgatgacaccattttctatagaagtagtaatatgtttcttattcttaaaatgtagaatattacacattactcttaaatggaaaggatgttttgtgaaatggctgagctaatattttcaacattaatgccaccaacatgttaccttttctctgattgcatggcgaattgatcattttcagggagaaagcatggcatgcagcaactagcaatcagactgtgagcagccgtgggagctggagccctggagactactccacttcaaactgcctctaaagataaaactgctggccaggtttgaggaggtcgggattcgccaaagcagctgcccttcatttttgcgggaaacctcgtcatttcacattgacgactatctgcatctgcggcagagtgaggacctcctctttgagaagtggaggcagaagcaaagaatcgagtctggcggcctgttcctgtgcagtagaccgacaatattgtagattatggccaattatttatcggcctggtcctggcaggatgagtgtagtagtgtacctaatttggtaggcaatgggtttgagttaggccaataaatgtgcaggtttacatttggttgccatgttagttcataacttcatacacttccatttttgtacgtcggcgatgtttcaaccagaacagattatgtttccttgggactgtaaatttcttcatcgctccatcccaatgaacttgcaagagattcgtgttagcaaccaaaattgctctgtccttcccaaaaagcattgcctctggatcttttccgatcaagatcagaaaccctatatgtattgttcttatgttctgctgtgggtcgttggttcttgtcacccttaaacttctctgtttggtacccagataaatacaaattcggctggtgggtagaaaaaccgcctacgaacactggtttcaccttataagactactgcactgtttctagcaggcttatttttctcttcgttttttatattccaatgtatacatattaatgtttatcgagctatgatcttataaatttgtacatgcttcaatattttctaaaaacttgaataacagtatgtaaaacctaggttgatgtttcaaatgaacttatttaacattttacgttgaaacagtacatcgcgaatggcatattattttgttgcatttattctaaacaccttaaaatggaatttgaaaacgggctctaagtttgagagaagtttaagggtaatagtattctaaacacttcaagtttgagatccaaaataattaatctctcacctatcacctccaatcaagttgtttatcagtttatgccatgtacatgtatcgctggtttgttatttcacctcattttcgctatgtatctactactattgcgctaatctcaaatattagatgacatgtaaactaaaatctttggaaagattaataggatacccgcgggtgctgatatctgtttctaaaaatgttgaatctaactatttgtaaatattgatatatttttcagaaatgttggatttagtcttgtgaaatgttgaaccgatatctctgatatggatttaatgggcttaaagcttccactagccgtgtgcatgggcgaaaaaaaatcttggccaagtgttactccgtcgcggccacacgccacaagtcctcccggccctcgctcgccccttatcccatcgtacccgccacacggcgcgccaccagtggcgccgcggatgcgcctcatctccccggcggccacctcgcgcggtttagatttccctgggcccccctcgcggtaccgtcacatatttttggcgcctcttcttctgcgcccctctcctcccgaaccgcagata

SEQ ID NO: 370 - DNA, 888 bp, Setaria italica
  source 1..888: mol_type = genomic DNA
ccacatcggtagatcacatccaaggtgctaaatagtgacttcaaacctgcgcttgtacacaatgtccactcatttgctgttaaatcttagtgtcaacttcttactgacgagttttcctggttcattaactttgcttttcaagtaatatgtatttttctactttgcatgtcatcccctggtacttttattttatggcattcacttttttagcaatataacatcttcttgtcattcattgcagagtgttgttagtgaaggaaagagcaatgctcttgatgtcagttttgtgcgtgcgccaattggcatggacctggattggcagctcatggcaaagatatcaccatgccatgttacggtacttatctaacccaagtactttatgtggagggaacttcatctctagtactggtcattcaggggaagtttttttttatttttaaaaatggtttggagacacaaagggtaatttttttgggcagggaaatatctatggggaaaaaagtagagggtttttgttaagtttcatggatgtgagaaaactgcgtaactcaaagcattaggaaatgatactcaaaagacactataagtgtcggtttggacagtgaaacagtcaccaagacactcctgtgaccattaatcgatagtgtgaaacacttgtaaaatgtagcaatatattttgtaactacttttggtgatgaatctagccatactattttcaaagctcaactaaaattttcaaaggccccatttggttcctcgtattggtggataaaaagtttcatcgagttctgtagatattccactcactcaaccagcaaagccacacatgtggactgcagctcacggccctgagcccattgcaagcatgatgcctcacctcttccggga

SEQ ID NO: 371 - DNA, 1106 bp, Setaria italica
  source 1..1106: mol_type = genomic DNA
ccacatcggtagatcacatccaaggtgctaaatagtgacttcaaacctgcgcttgtacacaatgtccactcatttgctgttaaatcttagtgtcaacttcttactgacgagttttcctggttcattaactttgcttttcaagtaatatgtatttttctactttgcatgtcatcccctggtacttttattttatggcattcacttttttagcaatataacatcttcttgtcattcattgcagagtgttgttagtgaaggaaagagcaatgctcttgatgtcagttttgtgcgtgcgccaattggcatggacctggattggcagctcatggcaaagatatcaccatgccatgttacggtacttatctaacccaagtactttatgtggagggaacttcatctctagtactggtcattcaggggaagtttttttttatttttaaaaatggtttggagacacaaagggtaatttttttgggcagggaaatatctatggggaaaaaagtagagggtttttgttaagtttcatggatgtgagaaaactgcgtaactcaaagcattaggaaatgatactcaaaagacactataagtgtcggtttggacagtgaaacagtcaccaagacactcctgtgaccattaatcgatagtgtgaaacacttgtaaaatgtagcaatatattttgtaactacttttggtgatgaatctagccatactattttcaaagctcaactaaaattttcaaaggccccatttggttcctcgtattggtggataaaaagtttcatcgagttctgtagatattccactcactcaaccagcaaagccacacatgtggactgcagctcacggccctgagcccattgcaagcatgatgcctcacctcttccgggaggggggccatgccacgtcggccggccaaagataccccgatcctacgtggcccaatgacgctcgggcgcacagatattgcgcccaatggcgggcggcatttggatatccccatcccgctccgtctcctctccggccgctcgtgctcgtgctcgtgctcttaatagcagccgcagattctgctccgctctcaaacgccacttgtcctccctccctcctct

SEQ ID NO: 372 - DNA, 336 bp, Setaria italica
  source 1..336: mol_type = genomic DNA
ggataaaaagtttcatcgagttctgtagatattccactcactcaaccagcaaagccacacatgtggactgcagctcacggccctgagcccattgcaagcatgatgcctcacctcttccgggaggggggccatgccacgtcggccggccaaagataccccgatcctacgtggcccaatgacgctcgggcgcacagatattgcgcccaatggcgggcggcatttggatatccccatcccgctccgtctcctctccggccgctcgtgctcgtgctcgtgctcttaatagcagccgcagattctgctccgctctcaaacgccacttgtcctccctccctc

SEQ ID NO: 373 - DNA, 3067 bp, Setaria italica
  source 1..3067: mol_type = genomic DNA
atttaatactcctaattagtatctaacattcgacgtgataagtgttaaattagccatctaccagcacccgtaacaaatttttggggccaataaacaagaatggcgaccttttggccaccaaacactgcacacgtactccgtgtacctgtcagacgcaataacgcaacggtacaggacatagattgaggttgatgtatatcgtcctcgttttcagatcggtcagtttgctactgtgcaagcccccgactgtgggcattcgcttttcggttcggttccttggttgcgaagaaattcggttcttataaaatagaaacatatcggttctaaaaatgttcagaattggtcatttcggtttcggttatttcagttcggttccagttctaaccgaagtaaccgaattttttgaaagaggccaagacacaataaatatatgttttaaggcaaatttatgcaacactatatccattttcaatagtaaaatttataaggaaacaatagcagtataggaacacaaatatataacacaaatatatagtagttcaaatatgaaacaccaaacataaaccaaacataatcttacaaaatacaagtaagtgaagtataattcatgtaattcggttctttcggttcattcggttaattgagagtaggaactgaattttcttcagttatttcggttcctcaatatcaggaactgaataagaaaccgaatttttcggttcttttggttcggttttttagttcggttatttttgcccaggcctacgccgactggcgcggctgtccctctcgccagcacggcgcgccccacacgacagttacgcgcccgcgcgttgggcatagggggcaggccggcggatgatctgcatcacgtcgcggagggtaggagggttggtggcctgagcctgacctgcttggtgggctggtggtgcgcgtccctttcagcggttcgggccggggtgggggtgttgcgcggcgggtgatcgatgagccggcgggggcggagatgagaagcctcggcctcgccgtcgtggcggtcgagctggcaagttggcggcatcattttctggcgcgcggggaacagggggacgtccaggacgtgggatagtagtcgtactcgcacggtgcgattcggttgggtggatgaattcgctcagctcgttatttcaaaagaaaaaagaattcgctcagctctttttccttgaccaatcatatggcggccaggtcgcggcacatgcaagcgcgtgcgtgatgcttcgccttttaggggtgtttggaaacacgctcctaaacagtttaatcacatcgcatatttgatactaattatgagtattaaatatagtctaattacaaaattaattgcaaagatggagtctaattcgtgagatgaatctattaagcctaattagtccatgatttgacaatgtggtgctacagtaatcatttgctaatgatggattaagggggtgtttgggaggagggggctaaattttagccccgtcacatcgaatgtttgacactaattaggagtattaaacctagactaattacaaaactaattacacaacctctaggctaaatcgcgagacgaatctattaagcctaattagttcatgatttgacaatgtggtgctatagtaaccattcactaatgatggattaattaggcttaatagattcgtcttgcgatttagcctaggggttctgcaattagttttgtaattagcttatgtttagtcctcctaattagtatccgaacatccaatgtgacagagctaaagtttagcccctggtatccaaacgccccctaattaggcttaatagattcgtctcacgaattagtagggaatctatagttagttttataattagctcatgtttagtcctcataattagcatccgaacatctgatgtgaccctcctaaaatttagtacctcgtgtccgaacacccccgtttaatcatattttcttcgttccgttccgacaccaaaagcgagagttgatgatagctgggcgatgcttgtgccttgtgcgtttggctgggcctggtgcgccggcgtgcagatcggaggagggcgttgcgtgcccgcggcacgtatgcaacagcaacgcaaatggagccccgacagcgccgtgtatgcttgcacccaacgtctcgacgaccacgcggcacggcacgcaaaaaatctggccccggcctctgtcgcacagatctgtccaacatctcctgttcgtatgatccccctcgtgaatgcgatgcttgctaacactaaataaggtttcccctttttcctttttgcggggaaaagaattgaatgtttccctttgaaccgtgcacgccgcactgatccagccctgctcaccgggactaaaatatcgtcgccggctgactttacactacacccacccacccgtcgaccatcgccatcgacgaggtaaacagcaaagcaaaagataatcccggcctccaaacgcgtcatcggccacttgggcttgggccactcgcagggaaaaatcgtgccgaatccacatcgaccctcctatttgctattcctaccgtgcccgcgccttcgctgaacgtctcctaccccctgcgcttcttggaacgaccgcaccaacaccagagcaagggcgcagccactggccacttgttacgcaaaagaatcctatccacgacaggcggatcggggagtgggtaggtcgcggcaggtggcggtggcggtggtaggaatgaaccccgggatcgtgcgtttgtggactgccacaacgacgggtgctcgatccatgtgttctcctcaatcaaaaaagaataaaaaaaacgttaatagaatggaaaaggtgaatgcttgaggaggtttggtgggtcaacagcaacatgagagggaaatgtctttggtttccaggaaggagagagttggtgagagcgccggagtgtaaagtctaaggcactcgcctttgctttatacgaaggttaggaataatggtgccgagagcaatcaggcaacacacaccaaccctgctaaactcccgggcctcccagctcataaatagagtatcgctgcgagg

SEQ ID NO: 374 - DNA, 2983 bp, Setaria italica
  source 1..2983: mol_type = genomic DNA
cgacggcccgggctggtatttaatactcctaattagtatctaacattcgacgtgataagtgttaaattagccatctaccagcacccgtaacaaatttttggggccaataaacaagaatggcgaccttttggccaccaaacactgcacacgtactccgtgtacctgtcagacgcaataacgcaacggtacaggacatagattgaggttgatgtatatcgtcctcgttttcagatcggtcagtttgctactgtgcaagcccccgactgtgggcattcgcttttcggttcggttccttggttgcgaagaaattcggttcttataaaatagaaacatatcggttctaaaaatgttcagaattggtcatttcggtttcggttatttcagttcggttccagttctaaccgaagtaaccgaattttttgaaagaggccaagacacaataaatatatgttttaaggcaaatttatgcaacactatatccattttcaatagtaaaatttataaggaaacaatagcagtataggaacacaaatatataacacaaatatatagtagttcaaatatgaaacaccaaacataaaccaaacataatcttacaaaatacaagtaagtgaagtataattcatgtaattcggttctttcggttcattcggttaattgagagtaggaactgaattttcttcagttatttcggttcctcaatatcaggaactgaataagaaaccgaatttttcggttcttttggttcggttttttagttcggttatttttgcccaggcctacgccgactggcgcggctgtccctctcgccagcacggcgcgccccacacgacagttacgcgcccgcgcgttgggcatagggggcaggccggcggatgatctgcatcacgtcgcggagggtaggagggttggtggcctgagcctgacctgcttggtgggctggtggtgcgcgtccctttcagcggttcgggccggggtgggggtgttgcgcggcgggtgatcgatgagccggcgggggcggagatgagaagcctcggcctcgccgtcgtggcggtcgagctggcaagttggcggcatcattttctggcgcgcggggaacagggggacgtccaggacgtgggatagtagtcgtactcgcacggtgcgattcggttgggtggatgaattcgctcagctcgttatttcaaaagaaaaaagaattcgctcagctctttttccttgaccaatcatatggcggccaggtcgcggcacatgcaagcgcgtgcgtgatgcttcgccttttaggggtgtttggaaacacgctcctaaacagtttaatcacatcgcatatttgatactaattatgagtattaaatatagtctaattacaaaattaattgcaaagatggagtctaattcgtgagatgaatctattaagcctaattagtccatgatttgacaatgtggtgctacagtaatcatttgctaatgatggattaagggggtgtttgggaggagggggctaaattttagccccgtcacatcgaatgtttgacactaattaggagtattaaacctagactaattacaaaactaattacacaacctctaggctaaatcgcgagacgaatctattaagcctaattagttcatgatttgacaatgtggtgctatagtaaccattcactaatgatggattaattaggcttaatagattcgtcttgcgatttagcctaggggttctgcaattagttttgtaattagcttatgtttagtcctcctaattagtatccgaacatccaatgtgacagagctaaagtttagcccctggtatccaaacgccccctaattaggcttaatagattcgtctcacgaattagtagggaatctatagttagttttataattagctcatgtttagtcctcataattagcatccgaacatctgatgtgaccctcctaaaatttagtacctcgtgtccgaacacccccgtttaatcatattttcttcgttccgttccgacaccaaaagcgagagttgatgatagctgggcgatgcttgtgccttgtgcgtttggctgggcctggtgcgccggcgtgcagatcggaggagggcgttgcgtgcccgcggcacgtatgcaacagcaacgcaaatggagccccgacagcgccgtgtatgcttgcacccaacgtctcgacgaccacgcggcacggcacgcaaaaaatctggccccggcctctgtcgcacagatctgtccaacatctcctgttcgtatgatccccctcgtgaatgcgatgcttgctaacactaaataaggtttcccctttttcctttttgcggggaaaagaattgaatgtttccctttgaaccgtgcacgccgcactgatccagccctgctcaccgggactaaaatatcgtcgccggctgactttacactacacccacccacccgtcgaccatcgccatcgacgaggtaaacagcaaagcaaaagataatcccggcctccaaacgcgtcatcggccacttgggcttgggccactcgcagggaaaaatcgtgccgaatccacatcgaccctcctatttgctattcctaccgtgcccgcgccttcgctgaacgtctcctaccccctgcgcttcttggaacgaccgcaccaacaccagagcaagggcgcagccactggccacttgttacgcaaaagaatcctatccacgacaggcggatcggggagtgggtaggtcgcggcaggtggcggtggcggtggtaggaatgaaccccgggatcgtgcgtttgtggactgccacaacgacgggtgctcgatccatgtgttctcctcaatcaaaaaagaataaaaaaaacgttaatagaatggaaaaggtgaatgcttgaggaggtttggtgggtcaacagcaacatgagagggaaatgtctttggtttccaggaaggagagagttggtgagagcgccggagtgtaaagtctaaggcactcgcctttgctttata

SEQ ID NO: 375 - DNA, 3081 bp, Setaria italica
  source 1..3081: mol_type = genomic DNA
gttaaattagccatctaccagcacccgtaacaaatttttggggccaataaacaagaatggcgaccttttggccaccaaacactgcacacgtactccgtgtacctgtcagacgcaataacgcaacggtacaggacatagattgaggttgatgtatatcgtcctcgttttcagatcggtcagtttgctactgtgcaagcccccgactgtgggcattcgcttttcggttcggttccttggttgcgaagaaattcggttcttataaaatagaaacatatcggttctaaaaatgttcagaattggtcatttcggtttcggttatttcagttcggttccagttctaaccgaagtaaccgaattttttgaaagaggccaagacacaataaatatatgttttaaggcaaatttatgcaacactatatccattttcaatagtaaaatttataaggaaacaatagcagtataggaacacaaatatataacacaaatatatagtagttcaaatatgaaacaccaaacataaaccaaacataatcttacaaaatacaagtaagtgaagtataattcatgtaattcggttctttcggttcattcggttaattgagagtaggaactgaattttcttcagttatttcggttcctcaatatcaggaactgaataagaaaccgaatttttcggttcttttggttcggttttttagttcggttatttttgcccaggcctacgccgactggcgcggctgtccctctcgccagcacggcgcgccccacacgacagttacgcgcccgcgcgttgggcatagggggcaggccggyggatgatctgcatcacgtcgcggagggtaggagggttggtggcctgagcctgacctgcttggtgggctggtggtgcgcgtccctttcagcggttcgggccggggtgggggtgttgcgcggcgggtgatcgatgagccggcgggggcggagatgagaagcctcggcctcgccgtcgtggcggtcgagctggcaagttggcggcatcattttctggcgcgcggggaacagggggacgtccaggacgtgggatagtagtcgtactcgcacggtgcgattcggttgggtggatgaattcgctcagctcgttatttcaaaagaaaaaagaattcgctcagctctttttccttgaccaatcatatggcggccaggtcgcggcacatgcaagcgcgtgcgtgatgcttcgccttttaggggtgtttggaaacacgctcctaaacagtttaatcacatcgcatatttgatactaattatgagtattaaatatagtctaattacaaaattaattgcaaagatggagtctaattcgtgagatgaatctattaagcctaattagtccatgatttgacaatgtggtgctacagtaatcatttgctaatgatggattaagggggtgtttgggaggagggggctaaattttagccccgtcacatcgaatgtttgacactaattaggagtattaaacctagactaattacaaaactaattacacaacctctaggctaaatcgcgagacgaatctattaagcctaattagttcatgatttgacaatgtggtgctatagtaaccattcactaatgatggattaattaggcttaatagattcgtcttgcgatttagcctaggggttctgcaattagttttgtaattagcttatgtttagtcctcctaattagtatccgaacatccaatgtgacagagctaaagtttagcccctggtatccaaacgccccctaattaggcttaatagattcgtctcacgaattagtagggaatctatagttagttttataattagctcatgtttagtcctcataattagcatccgaacatctgatgtgaccctcctaaaatttagtacctcgtgtccgaacacccccgtttaatcatattttcttcgttccgttccgacaccaaaagcgagagttgatgatagctgggcgatgcttgtgccttgtgcgtttggctgggcctggtgcgccggcgtgcagatcggaggagggcgttgcgtgcccgcggcacgtatgcaacagcaacgcaaatggagccccgacagcgccgtgtatgcttgcacccaacgtctcgacgaccacgcggcacggcacgcaaaaaatctggccccggcctctgtcgcacagatctgtccaacatctcctgttcgtatgatccccctcgtgaatgcgatgcttgctaacactaaataaggtttcccctttttcctttttgcggggaaaagaattgaatgtttccctttgaaccgtgcacgccgcactgatccagccctgctcaccgggactaaaatatcgtcgccggctgactttacactacacccacccacccgtcgaccatcgccatcgacgaggtaaacagcaaagcaaaagataatcccggcctccaaacgcgtcatcggccacttgggcttgggccactcgcagggaaaaatcgtgccgaatccacatcgaccctcctatttgctattcctaccgtgcccgcgccttcgctgaacgtctcctaccccctgcgcttcttggaacgaccgcaccaacaccagagcaagggcgcagccactggccacttgttacgcaaaagaatcctatccacgacaggcggatcggggagtgggtaggtcgcggcaggtggcggtggcggtggtaggaatgaaccccgggatcgtgcgtttgtggactgccacaacgacgggtgctcgatccatgtgttctcctcaatcaaaaaagaataaaaaaaacgttaatagaatggaaaaggtgaatgcttgaggaggtttggtgggtcaacagcaacatgagagggaaatgtctttggtttccaggaaggagagagttggtgagagcgccggagtgtaaagtctaaggcactcgcctttgctttatacgaaggttaggaataatggtgccgagagcaatcaggcaacacacaccaaccctgctaaactcccgggcctcccagctcataaatagagtatcgctgcgaggccgagcagtgggcgaccctgtgagcttagctagcaagcaatcaagcactgccacctg

SEQ ID NO: 376 - DNA, 2923 bp, Setaria italica
  source 1..2923: mol_type = genomic DNA
gttaaattagccatctaccagcacccgtaacaaatttttggggccaataaacaagaatggcgaccttttggccaccaaacactgcacacgtactccgtgtacctgtcagacgcaataacgcaacggtacaggacatagattgaggttgatgtatatcgtcctcgttttcagatcggtcagtttgctactgtgcaagcccccgactgtgggcattcgcttttcggttcggttccttggttgcgaagaaattcggttcttataaaatagaaacatatcggttctaaaaatgttcagaattggtcatttcggtttcggttatttcagttcggttccagttctaaccgaagtaaccgaattttttgaaagaggccaagacacaataaatatatgttttaaggcaaatttatgcaacactatatccattttcaatagtaaaatttataaggaaacaatagcagtataggaacacaaatatataacacaaatatatagtagttcaaatatgaaacaccaaacataaaccaaacataatcttacaaaatacaagtaagtgaagtataattcatgtaattcggttctttcggttcattcggttaattgagagtaggaactgaattttcttcagttatttcggttcctcaatatcaggaactgaataagaaaccgaatttttcggttcttttggttcggttttttagttcggttatttttgcccaggcctacgccgactggcgcggctgtccctctcgccagcacggcgcgccccacacgacagttacgcgcccgcgcgttgggcatagggggcaggccggyggatgatctgcatcacgtcgcggagggtaggagggttggtggcctgagcctgacctgcttggtgggctggtggtgcgcgtccctttcagcggttcgggccggggtgggggtgttgcgcggcgggtgatcgatgagccggcgggggcggagatgagaagcctcggcctcgccgtcgtggcggtcgagctggcaagttggcggcatcattttctggcgcgcggggaacagggggacgtccaggacgtgggatagtagtcgtactcgcacggtgcgattcggttgggtggatgaattcgctcagctcgttatttcaaaagaaaaaagaattcgctcagctctttttccttgaccaatcatatggcggccaggtcgcggcacatgcaagcgcgtgcgtgatgcttcgccttttaggggtgtttggaaacacgctcctaaacagtttaatcacatcgcatatttgatactaattatgagtattaaatatagtctaattacaaaattaattgcaaagatggagtctaattcgtgagatgaatctattaagcctaattagtccatgatttgacaatgtggtgctacagtaatcatttgctaatgatggattaagggggtgtttgggaggagggggctaaattttagccccgtcacatcgaatgtttgacactaattaggagtattaaacctagactaattacaaaactaattacacaacctctaggctaaatcgcgagacgaatctattaagcctaattagttcatgatttgacaatgtggtgctatagtaaccattcactaatgatggattaattaggcttaatagattcgtcttgcgatttagcctaggggttctgcaattagttttgtaattagcttatgtttagtcctcctaattagtatccgaacatccaatgtgacagagctaaagtttagcccctggtatccaaacgccccctaattaggcttaatagattcgtctcacgaattagtagggaatctatagttagttttataattagctcatgtttagtcctcataattagcatccgaacatctgatgtgaccctcctaaaatttagtacctcgtgtccgaacacccccgtttaatcatattttcttcgttccgttccgacaccaaaagcgagagttgatgatagctgggcgatgcttgtgccttgtgcgtttggctgggcctggtgcgccggcgtgcagatcggaggagggcgttgcgtgcccgcggcacgtatgcaacagcaacgcaaatggagccccgacagcgccgtgtatgcttgcacccaacgtctcgacgaccacgcggcacggcacgcaaaaaatctggccccggcctctgtcgcacagatctgtccaacatctcctgttcgtatgatccccctcgtgaatgcgatgcttgctaacactaaataaggtttcccctttttcctttttgcggggaaaagaattgaatgtttccctttgaaccgtgcacgccgcactgatccagccctgctcaccgggactaaaatatcgtcgccggctgactttacactacacccacccacccgtcgaccatcgccatcgacgaggtaaacagcaaagcaaaagataatcccggcctccaaacgcgtcatcggccacttgggcttgggccactcgcagggaaaaatcgtgccgaatccacatcgaccctcctatttgctattcctaccgtgcccgcgccttcgctgaacgtctcctaccccctgcgcttcttggaacgaccgcaccaacaccagagcaagggcgcagccactggccacttgttacgcaaaagaatcctatccacgacaggcggatcggggagtgggtaggtcgcggcaggtggcggtggcggtggtaggaatgaaccccgggatcgtgcgtttgtggactgccacaacgacgggtgctcgatccatgtgttctcctcaatcaaaaaagaataaaaaaaacgttaatagaatggaaaaggtgaatgcttgaggaggtttggtgggtcaacagcaacatgagagggaaatgtctttggtttccaggaaggagagagttggtgagagcgccggagtgtaaagtctaaggcactcgcctttgctttata

SEQ ID NO: 377 - DNA, 987 bp, Setaria italica
  source 1..987: mol_type = genomic DNA
gatataagtgggtaattttgatgaagattaggggttactttagtttattttatacaatggcagaggtgggtaatttagatatagttttaggaagttactttatgctacttttataatggcatatgtgagtaattttttaaaaacataatagatccaatggctacgatgatttgaggctaccgattgttggctagatgtcttgtttttttttgaatttctaggatttctctcattttctagagcgtcaacctaggattccaggtggcgtcacctggaggcttcaaaaggagcctccagttagtaattatactaataatctctcttttactagagcgtccacttaggatcctaggtagcgtccacttaggatcctaggtagcttcacctgaaagcttcaaaagaagtcttcaattagtaatagtaagatttgacatcataggtattattattgctttatataatcctgtcaaacttaaagcagtttaactcaaaaataaaattagaatcccttgtgtattgaaacaaaattagaaccccttatgtattttagaaggaaatgaagtactatagtatgtaaccaacgagacgtaacataccgtacaagttaccgaaccttaacggtcaacttattctacgttggtaaaactttgtggacgagagaagttcttgtcactgaagttagtggagaagggaagcgcgtagtcaaccagcggataagatggtaatggggccgacaccacgtcggttgcttgtcgccgccagaaatggcgcagcagaattcattctcattcatgcgccctactaaccaatgggttggttcatgaacatgtcattttcagttcggtgtattaggctggtgagctgtcctccacgctgtccaaattccaagctaccaagatgagcacactaatcaatattccaagtttccaatcccaatccaacactatataagaagctaaacaagcaagaagaagaagaagaatcaat

SEQ ID NO: 378 - DNA, 203 bp, Setaria italica
  source 1..203: mol_type = genomic DNA
attgtttataatgatataagtgggtaattttgatgaagattaggggttactttagtttattttatacaatggcagaggtgggtaatttagatatagttttaggaagttactttatgctacttttataatggcatatgtgagtaattttttaaaaacataatagatccaatggctacgatgatttgaggctaccgattgttggc

SEQ ID NO: 379 - DNA, 908 bp, Setaria italica
  source 1..908: mol_type = genomic DNA
aaaaacataatagatccaatggctacgatgatttgaggctaccgattgttggctagatgtcttgtttttttttgaatttctaggatttctctcattttctagagcgtcaacctaggattccaggtggcgtcacctggaggcttcaaaaggagcctccagttagtaattatactaataatctctcttttactagagcgtccacttaggatcctaggtagcgtccacttaggatcctaggtagcttcacctgaaagcttcaaaagaagtcttcaattagtaatagtaagatttgacatcataggtattattattgctttatataatcctgtcaaacttaaagcagtttaactcaaaaataaaattagaatcccttgtgtattgaaacaaaattagaaccccttatgtattttagaaggaaatgaagtactatagtatgtaaccaacgagacgtaacataccgtacaagttaccgaaccttaacggtcaacttattctacgttggtaaaactttgtggacgagagaagttcttgtcactgaagttagtggagaagggaagcgcgtagtcaaccagcggataagatggtaatggggccgacaccacgtcggttgcttgtcgccgccagaaatggcgcagcagaattcattctcattcatgcgccctactaaccaatgggttggttcatgaacatgtcattttcagttcggtgtattaggctggtgagctgtcctccacgctgtccaaattccaagctaccaagatgagcacactaatcaatattccaagtttccaatcccaatccaacactatataagaagctaaacaagcaagaagaagaagaagaatcaatcacccatcagcaatggcgctcgcaagccgccggaggctagcagcctccctcctggccct

SEQ ID NO: 380 - DNA, 984 bp, Setaria italica
  source 1..984: mol_type = genomic DNA
ataagtgggtaattttgatgaagattaggggttactttagtttattttatacaatggcagaggtgggtaatttagatatagttttaggaagttactttatgctacttttataatggcatatgtgagtaattttttaaaaacataatagatccaatggctacgatgatttgaggctaccgattgttggctagatgtcttgtttttttttgaatttctaggatttctctcattttctagagcgtcaacctaggattccaggtggcgtcacctggaggcttcaaaaggagcctccagttagtaattatactaataatctctcttttactagagcgtccacttaggatcctaggtagcgtccacttaggatcctaggtagcttcacctgaaagcttcaaaagaagtcttcaattagtaatagtaagatttgacatcataggtattattattgctttatataatcctgtcaaacttaaagcagtttaactcaaaaataaaattagaatcccttgtgtattgaaacaaaattagaaccccttatgtattttagaaggaaatgaagtactatagtatgtaaccaacgagacgtaacataccgtacaagttaccgaaccttaacggtcaacttattctacgttggtaaaactttgtggacgagagaagttcttgtcactgaagttagtggagaagggaagcgcgtagtcaaccagcggataagatggtaatggggccgacaccacgtcggttgcttgtcgccgccagaaatggcgcagcagaattcattctcattcatgcgccctactaaccaatgggttggttcatgaacatgtcattttcagttcggtgtattaggctggtgagctgtcctccacgctgtccaaattccaagctaccaagatgagcacactaatcaatattccaagtttccaatcccaatccaacactatataagaagctaaacaagcaagaagaagaagaagaatcaat

SEQ ID NO: 381 - DNA, 740 bp, Setaria italica
  source 1..740: mol_type = genomic DNA
acctaggattccaggtggcgtcacctggaggcttcaaaaggagcctccagttagtaattatactaataatctctcttttactagagcgtccacttaggatcctaggtagcgtccacttaggatcctaggtagcttcacctgaaagcttcaaaagaagtcttcaattagtaatagtaagatttgacatcataggtattattattgctttatataatcctgtcaaacttaaagcagtttaactcaaaaataaaattagaatcccttgtgtattgaaacaaaattagaaccccttatgtattttagaaggaaatgaagtactatagtatgtaaccaacgagacgtaacataccgtacaagttaccgaaccttaacggtcaacttattctacgttggtaaaactttgtggacgagagaagttcttgtcactgaagttagtggagaagggaagcgcgtagtcaaccagcggataagatggtaatggggccgacaccacgtcggttgcttgtcgccgccagaaatggcgcagcagaattcattctcattcatgcgccctactaaccaatgggttggttcatgaacatgtcattttcagttcggtgtattaggctggtgagctgtcctccacgctgtccaaattccaagctaccaagatgagcacactaatcaatattccaagtttccaatcccaatccaacactatataagaagctaaacaagcaagaagaagaagaagaatcaat

SEQ ID NO: 382 - DNA, 3059 bp, Setaria italica
  source 1..3059: mol_type = genomic DNA
actgatatatgcttctgtgtggtatggtcatggacacaatattacatgcttttatttggagtgtttacttaatgggttccatgctatcatatagtctttctatttatatgaagaagtatggtcttaatttctggagtgcttatcctaaagctgtaatttcacatcatcacagaaggatatgcagaatatttcttcttaaattgaaacaacattgattcctagatatgtaacggtcaggttgagtttatggtagtaacttgttggcatggtgatgcagcagaagcatatctttgatcaaaaatattttcttactaggtgtgctctagagctaaattctaaaatctatattgtgaacatcatgtcttctactgagagctcatatcagcccatcagctgccagtgttcgctagaactgtaaagctattatccaatagctctgattgcgttctcttttatctgtgcattctctaggccgtgacaaaatcagaacctccagaaaaggcattaagtagtgatgcacaaccaactcaagttattactgagctccgaaggagctatactagtaaattggaagaggtatgcttctatggaaacataattttttttaatctgtgttaattctgattctttactcaacatgcatttttgcattttctgtgcatctttcagtcagagaagcggaaacaggaattgttagctcaattggccgcagaagaacaacatggtcatgagctcacaaaaatagttagagaactgctacctactcctaagaagactgcaaatctacaaaggcagccgcggcacagaagggtaaacttgcttggttgccgttgtttccagttactacccacggattaaaaatttgatgtgaattttcttccagaggagcaatgatagatcaaaggtgtcaaaacgacttactgaagaggccgagcaatactttgaagatttcctatcaaacgttgaagacaccgacttttcatcttttgatggagaaagaagtgacacaagttcaacaaggaaagatgtgttacatcatgctatgatggaaactccagtggctctcccgaaagttgcttcacctgctgaggcagatggcgttgtccttccttggctgcaatgggaaactgccaatgatcttcaaacctccccatgcaaaaccaaggctgaggtaacgatgacaccattttctatagaagtagtaatatgtttcttattcttaaaatgtagaatattacacattactcttaaatggaaaggatgttttgtgaaatggctgagctaatattttcaacattaatgccaccaacatgttaccttttctctgattgcatggcgaattgatcattttcagggagaaagcatggcatgcagcaactagcaatcagactgtgagcagccgtgggagctggagccctggagactactccacttcaaactgcctctaaagataaaactgctggccaggtttgaggaggtcgggattcgccaaagcagctgcccttcatttttgcgggaaacctcgtcatttcacattgacgactatctgcatctgcggcagagtgaggacctcctctttgagaagtggaggcagaagcaaagaatcgagtctggcggcctgttcctgtgcagtagaccgacaatattgtagattatggccaattatttatcggcctggtcctggcaggatgagtgtagtagtgtacctaatttggtaggcaatgggtttgagttaggccaataaatgtgcaggtttacatttggttgccatgttagttcataacttcatacacttccatttttgtacgtcggcgatgtttcaaccagaacagattatgtttccttgggactgtaaatttcttcatcgctccatcccaatgaacttgcaagagattcgtgttagcaaccaaaattgctctgtccttcccaaaaagcattgcctctggatcttttccgatcaagatcagaaaccctatatgtattgttcttatgttctgctgtgggtcgttggttcttgtcacccttaaacttctctgtttggtacccagataaatacaaattcggctggtgggtagaaaaaccgcctacgaacactggtttcaccttataagactactgcactgtttctagcaggcttatttttctcttcgttttttatattccaatgtatacatattaatgtttatcgagctatgatcttataaatttgtacatgcttcaatattttctaaaaacttgaataacagtatgtaaaacctaggttgatgtttcaaatgaacttatttaacattttacgttgaaacagtacatcgcgaatggcatattattttgttgcatttattctaaacaccttaaaatggaatttgaaaacgggctctaagtttgagagaagtttaagggtaatagtattctaaacacttcaagtttgagatccaaaataattaatctctcacctatcacctccaatcaagttgtttatcagtttatgccatgtacatgtatcgctggtttgttatttcacctcattttcgctatgtatctactactattgcgctaatctcaaatattagatgacatgtaaactaaaatctttggaaagattaataggatacccgcgggtgctgatatctgtttctaaaaatgttgaatctaactatttgtaaatattgatatatttttcagaaatgttggatttagtcttgtgaaatgttgaaccgatatctctgatatggatttaatgggcttaaagcttccactagccgtgtgcatgggcgaaaaaaaatcttggccaagtgttactccgtcgcggccacacgccacaagtcctcccggccctcgctcgccccttatcccatcgtacccgccacacggcgcgccaccagtggcgccgcggatgcgcctcatctccccggcggccacctcgcgcggtttagatttccctgggcccccctcgcggtaccgtcacatatttttggcgcctcttcttctgcgcccctctcctcccgaaccgcagataccaccgagtcggcagctgaacacaagcaacaagcaagtgatcc

SEQ ID NO: 383 - DNA, 1140 bp, Setaria italica
  source 1..1140: mol_type = genomic DNA
ccacatcggtagatcacatccaaggtgctaaatagtgacttcaaacctgcgcttgtacacaatgtccactcatttgctgttaaatcttagtgtcaacttcttactgacgagttttcctggttcattaactttgcttttcaagtaatatgtatttttctactttgcatgtcatcccctggtacttttattttatggcattcacttttttagcaatataacatcttcttgtcattcattgcagagtgttgttagtgaaggaaagagcaatgctcttgatgtcagttttgtgcgtgcgccaattggcatggacctggattggcagctcatggcaaagatatcaccatgccatgttacggtacttatctaacccaagtactttatgtggagggaacttcatctctagtactggtcattcaggggaagtttttttttatttttaaaaatggtttggagacacaaagggtaatttttttgggcagggaaatatctatggggaaaaaagtagagggtttttgttaagtttcatggatgtgagaaaactgcgtaactcaaagcattaggaaatgatactcaaaagacactataagtgtcggtttggacagtgaaacagtcaccaagacactcctgtgaccattaatcgatagtgtgaaacacttgtaaaatgtagcaatatattttgtaactacttttggtgatgaatctagccatactattttcaaagctcaactaaaattttcaaaggccccatttggttcctcgtattggtggataaaaagtttcatcgagttctgtagatattccactcactcaaccagcaaagccacacatgtggactgcagctcacggccctgagcccattgcaagcatgatgcctcacctcttccgggaggggggccatgccacgtcggccggccaaagataccccgatcctacgtggcccaatgacgctcgggcgcacagatattgcgcccaatggcgggcggcatttggatatccccatcccgctccgtctcctctccggccgctcgtgctcgtgctcgtgctcttaatagcagccgcagattctgctccgctctcaaacgccacttgtcctccctccctcctctcgtctccccgtcacctcaggatcagcaagcggca

SEQ ID NO: 384 - DNA, 999 bp, Setaria italica
  source 1..999: mol_type = genomic DNA
gatataagtgggtaattttgatgaagattaggggttactttagtttattttatacaatggcagaggtgggtaatttagatatagttttaggaagttactttatgctacttttataatggcatatgtgagtaattttttaaaaacataatagatccaatggctacgatgatttgaggctaccgattgttggctagatgtcttgtttttttttgaatttctaggatttctctcattttctagagcgtcaacctaggattccaggtggcgtcacctggaggcttcaaaaggagcctccagttagtaattatactaataatctctcttttactagagcgtccacttaggatcctaggtagcgtccacttaggatcctaggtagcttcacctgaaagcttcaaaagaagtcttcaattagtaatagtaagatttgacatcataggtattattattgctttatataatcctgtcaaacttaaagcagtttaactcaaaaataaaattagaatcccttgtgtattgaaacaaaattagaaccccttatgtattttagaaggaaatgaagtactatagtatgtaaccaacgagacgtaacataccgtacaagttaccgaaccttaacggtcaacttattctacgttggtaaaactttgtggacgagagaagttcttgtcactgaagttagtggagaagggaagcgcgtagtcaaccagcggataagatggtaatggggccgacaccacgtcggttgcttgtcgccgccagaaatggcgcagcagaattcattctcattcatgcgccctactaaccaatgggttggttcatgaacatgtcattttcagttcggtgtattaggctggtgagctgtcctccacgctgtccaaattccaagctaccaagatgagcacactaatcaatattccaagtttccaatcccaatccaacactatataagaagctaaacaagcaagaagaagaagaagaatcaatcacccatcagca

SEQ ID NO: 385 - DNA, 996 bp, Setaria italica
  source 1..996: mol_type = genomic DNA
ataagtgggtaattttgatgaagattaggggttactttagtttattttatacaatggcagaggtgggtaatttagatatagttttaggaagttactttatgctacttttataatggcatatgtgagtaattttttaaaaacataatagatccaatggctacgatgatttgaggctaccgattgttggctagatgtcttgtttttttttgaatttctaggatttctctcattttctagagcgtcaacctaggattccaggtggcgtcacctggaggcttcaaaaggagcctccagttagtaattatactaataatctctcttttactagagcgtccacttaggatcctaggtagcgtccacttaggatcctaggtagcttcacctgaaagcttcaaaagaagtcttcaattagtaatagtaagatttgacatcataggtattattattgctttatataatcctgtcaaacttaaagcagtttaactcaaaaataaaattagaatcccttgtgtattgaaacaaaattagaaccccttatgtattttagaaggaaatgaagtactatagtatgtaaccaacgagacgtaacataccgtacaagttaccgaaccttaacggtcaacttattctacgttggtaaaactttgtggacgagagaagttcttgtcactgaagttagtggagaagggaagcgcgtagtcaaccagcggataagatggtaatggggccgacaccacgtcggttgcttgtcgccgccagaaatggcgcagcagaattcattctcattcatgcgccctactaaccaatgggttggttcatgaacatgtcattttcagttcggtgtattaggctggtgagctgtcctccacgctgtccaaattccaagctaccaagatgagcacactaatcaatattccaagtttccaatcccaatccaacactatataagaagctaaacaagcaagaagaagaagaagaatcaatcacccatcagca

SEQ ID NO: 386 - DNA, 752 bp, Setaria italica
  source 1..752: mol_type = genomic DNA
acctaggattccaggtggcgtcacctggaggcttcaaaaggagcctccagttagtaattatactaataatctctcttttactagagcgtccacttaggatcctaggtagcgtccacttaggatcctaggtagcttcacctgaaagcttcaaaagaagtcttcaattagtaatagtaagatttgacatcataggtattattattgctttatataatcctgtcaaacttaaagcagtttaactcaaaaataaaattagaatcccttgtgtattgaaacaaaattagaaccccttatgtattttagaaggaaatgaagtactatagtatgtaaccaacgagacgtaacataccgtacaagttaccgaaccttaacggtcaacttattctacgttggtaaaactttgtggacgagagaagttcttgtcactgaagttagtggagaagggaagcgcgtagtcaaccagcggataagatggtaatggggccgacaccacgtcggttgcttgtcgccgccagaaatggcgcagcagaattcattctcattcatgcgccctactaaccaatgggttggttcatgaacatgtcattttcagttcggtgtattaggctggtgagctgtcctccacgctgtccaaattccaagctaccaagatgagcacactaatcaatattccaagtttccaatcccaatccaacactatataagaagctaaacaagcaagaagaagaagaagaatcaatcacccatcagca

SEQ ID NO: 387 - DNA, 1148 bp, Setaria italica
  source 1..1148: mol_type = genomic DNA
ggtgacgagcatggacagtggcatgcagcatgtggatgggaacgccgtaacaagtgtcgattccggaggccacgggggtgtccgggacctccatctcgggactcgattttcgctaggacctcctctggatgtgacttgtctcttctgtgcaccgatgcacgctgctgcggcgtcggcgattgcaagcatctctcgactgcactgacgggcctctccctcgtatgggtagcctagccatcaactttcctgccctgtttccttcccgcacgcaaggctatgcaacaaaacctttgttagctgccaagctgatggcttttgctcgcttggaggcgacaggtgttgatacctcccatgtgatcgttgcaacagagaacctcgtggagttgtgggagtactagcgtccacccatgcgttaggaacgcagtatccaaccattccaacccccttctggccttctcaactatttgtcaaaattgttaagttaactaaacaatacaaccctgcgttctttttggctcatattgttatttgttcgttccgacctatatagattatgttttatatctctacaatttgctcttgttgtataaactacatgttcaactgatccggttagaatgacatgataatgataatgataataataatgatggtggagggtgcatagtacaaactcccattccataagatggtataatttgttctagatatatagactttttgttctatgtaaataaaattttgctcaacttatattcactttaaaaaatggtagttaaaggatggtggagggtgtagcgttttgttatgtcagcttttgtatgattcgctctctgtgtataatatttttttcacttacataaattttgttctagttaagatggcagtgtgaggagagaagggggcagatgacaacacccggtatattctctctcttcctcctcttcttgagagaggagttctctgtctcgaagaaccttttcatattcttcttttccgcaggctccccggctccatgggccgcagcctgtttgtgtgtgaacggaatagcggcccagagaacgcgcgcggtcgacatggtcgcgaatcgcgatttcgctgccttttttcttttcccgtttttataaataaatcagcccgaaaaaagg

SEQ ID NO: 388 - DNA, 1603 bp, Setaria italica
  source 1..1603: mol_type = genomic DNA
gcataaatactggcgaaatgttccttgtgatctctgatactgacagtgttgctgttcagagcttcaagtgccgtgtgcatgttgaacttggggagctaccagcagtgagtgctagtttgaagttggaaccaaggcctagcttagctttgtatcacatcaccgttgggatttcctgttttcttaggttgggtttgaattatgtgctcctcttaatggaaaaaaaaagctatactaccaagttcgaattccgattcagacccggagacatggcgcagaaactgctgaacatacggcgacttgtttggatggtcgtggtcctcgagatcgcgagatagaggaaaacaagcgatccatgtggatttccatggaagcgataggtagtgtggacagaggcttgttgaattctattccatccactttaaacagtatttggagcgcccgctatagcactgtaaggtagtggacccaagatagtctatttggacttcgaagccattaatgtccactagtgcccagtatcgtggtcgctattgcttatgttagacagctattcgctacatttatggttaaagtgacataggaatatgaatcaaacagtaataataatatttaaaatgattattcaggtaatgacgaaaaattattgggatgacaagtgaattttttttattcattgatacgaggatttaatgttaatatacatccatacatcttaattatactatttatttatgattcgtaccatgagatgcaattgctaacttgaaactaactttttttaagtgagcttgatgttaatattcatatatcctctaaaattgtgactattttctgaattccgctatttggacttagcgtccgctatagcactcgctatccgcgatctgctacaccagcactaatccgctaccataccgctaaacgctatttagtaccttgcccagtggcccggagcgttgtttgtgttgggccagagaactgtcaggtacgcgctgcacatccttttgctggttcagtggttctgcattcatctttgcacactttgcagacattgggctatgtctccgtgtgctccaatttgtgaaaatctgtaaatggaagacaaataggcatgcatgcataatgatcatgttgtgtacagttggctatgcttctggcttgaataatctttgtttaattatcaacaaaaagaatctttgttcatatgcccccaaacactttcagccaacgtacttgtcttaagtacaagctctattgataatagatgaaatttagtattctacgagtacgctggagcaatattgctattatttgggatgtgctcttccatcttcgatcaactttacgccgcatgatgcatgtgtacacaatgagaatacttcttgctggtctagccactctgaaaatcatagcccatggatatgaacaagtactatctacttgtacaccctacaatggttaatccaaaaaggatcggaagcattgatagaaattatgagaactgcaggaaacagtgaaattgtttctaactaattagtattactgaaaaacatatccttcttcataacatacacaaactattatttctgatattaaaactttg

SEQ ID NO: 389 - DNA, 1603 bp, Setaria italica; identical to SEQ ID NO: 41
  source 1..1603: mol_type = genomic DNA

SEQ ID NO: 390 - DNA, 2162 bp, Setaria italica
  source 1..2162: mol_type = genomic DNA
gcccttactatagggcacgcgtggtcgacggcccgggctggtaaactttaaagcgaaaacaaaaatatatcacaagtcaagcaatctcacttttaaggtaactgaactctactgtctgtgaacaacttataacataatttattagcacacaatttcatacagaaaaatatggtgatataccaccaaatgataccataacgctgaaactttttaaggtagccaccactaacctcaaaatcccagaacaatccacgctcactcatctttagctctctattttctccacagccgcttggccattccctgccctgcatgttttccaaagctgcttgtccaatgtccacagtagagaaaataggaatggcttgccttcagtgctaggccaaaccttgaaaactcaggtgcaaccgctgccttggagtatctacgtattctgaggtctcaacttcaaatgccttgtgtgaccagacagggcacttgttgttctataggttgcaacaagttgcccaccatggtgctactgattgaacaactggcttatttcaggcacactaaccttggtttaagttgtgatgttggggcagaacggttgtcaaatccaacagtagagagtggaggacaaagataggttaagaaagatgatggagaagggttttctcacatcttttcttattagtgggtgggtcttgggtgtgggtggataaaattggacaacctatttttagtggtattttctgaactatctgtgtgcagatctgccctataatggatatttcattataattctactgataatttatcattatccatatttgctcttacattaatgtttggcagtttgaccgcatcttttctgaaattaaaggtcctgcctaacatcattgatcgccaatgacacctacagcctagtcgatgaattgaccagttattagaaggctagtgcaaattcttcgaaatcctgttccatcagatgttaacagaaatgtaccgagatatttgaagtagcggtaaaggtataattctgtgagagtgacaacaagtgcttgcacataaataacataaataggaacttcctctaatctacgttcaaattttatgttattactatcagtattttatttcacggtgagaacgaaaacttcaattcttctattagaggacatactattgtctgataccataaattacattggatttgtttggtctcccagcctattgtttcttttgcacctcacattgttttcagtatcccaatttggctagtaaaagaacatgactattgtaatgcagtgtttattgttttcatcatttcttcctcctctattccagggacactgttgttgctttattcgacgagctggttatcaacaccaagaagcttgtgacggcaacttcaaaagggatcgaaaaatggcgttgagctgcaccaccgcgtcattgtcgatattagctgccttcaactgcggtgtatcaagtgaagattagaagcagtgtttatcttgaacaagcagtggcacttagatctagaatccagactgtcgcatcgtatggctttctcttgctcatcagttagtagctttgtatctaagtaggatcctgaaatgaggccgacgatatctggtagatatatttagttacatgccattgtgttgagtgatgtccctggtgctgggttgctcatcacagatattaaattttagaatgaattgatgtgtgagattcagatgaactatgatttgtgcttgtgcgcgtgttcttcaccctcttggtaccagtgtgtggcctggaattgctgtcttggttctttctctatcactggttggttctccctccgtctccatctatcatgtttgttagtccctatactactgacaaaaaagttcaccagaggccctaatgctgccacatcagcgccctctaaagttgccatatcagcatcctcatctgccaagtcggcacagcctgcccaatcgcatccaagcaacagatagccctcctgggcacccagccaatggcagctcccatggccaaatctcagatgggcccacagcatcctccgatccccatttccatccatttaaactagctcaccttttcctccacaaacgcccatcagccatccccctcctgcaattcttcctctgaactgtgggtctgcggca

SEQ ID NO: 391 - DNA, 2162 bp, Setaria italica
  source 1..2162: mol_type = genomic DNA
gcccttactatagggcacgcgtggtcgacggcccgggctggtaaactttaaagcgaaaacaaaaatatatcacaagtcaagcaatctcacttttaaggtaactgaactctactgtctgtgaacaacttataacataatttattagcacacaatttcatacagaaaaatatggtgatataccaccaaatgataccataacgctgaaactttttaaggtagccaccactaacctcaaaatcccagaacaatccacgctcactcatctttagctctctattttctccacagccgcttggccattccctgccctgcatgttttccaaagctgcttgtccaatgtccacagtagagaaaataggaatggcttgccttcagtgctaggccaaaccttgaaaactcaggtgcaaccgctgccttggagtatctacgtattctgaggtctcaacttcaaatgccttgtgtgaccagacagggcacttgttgttctataggttgcaacaagttgcccaccatggtgctactgattgaacaactggcttatttcaggcacactaaccttggtttaagttgtgatgttggggcagaacggttgtcaaatccaacagtagagagtggaggacaaagataggttaagaaagatgatggagaagggttttctcacatcttttcttattagtgggtgggtcttgggtgtgggtggataaaattggacaacctatttttagtggtattttctgaactatctgtgtgcagatctgccctataatggatatttcattataattctactgataatttatcattatccatatttgctcttacattaatgtttggcagtttgaccgcatcttttctgaaattaaaggtcctgcctaacatcatttgaatcgcctaagtactacagcctagtcgatgaattgaccagttattagaaggctagtgcaaattcttcgaaatcctgttccatcagatgttaacagaaatgtaccgagatatttgaagtagcggtaaaggtataattctgtgagagtgacaacaagtgcttgcacataaataacataaataggaacttcctctaatctacgttcaaattttatgttattactatcagtattttatttcacggtgagaacgaaaacttcaattcttctattagaggacatactattgtctgataccataaattacattggatttgtttggtctcccagcctattgtttcttttgcacctcacattgttttcagtatcccaatttggctagtaaaagaacatgactattgtaatgcagtgtttattgttttcatcatttcttcctcctctattccagggacactgttgttgctttattcgacgagctggttatcaacaccaagaagcttgtgacggcaacttcaaaagggatcgaaaaatggcgttgagctgcaccaccgcgtcattgtcgatattagctgccttcaactgcggtgtatcaagtgaagattagaagcagtgtttatcttgaacaagcagtggcacttagatctagaatccagactgtcgcatcgtatggctttctcttgctcatcagttagtagctttgtatctaagtaggatcctgaaatgaggccgacgatatctggtagatatatttagttacatgccattgtgttgagtgatgtccctggtgctgggttgctcatcacagatattaaattttagaatgaattgatgtgtgagattcagatgaactatgatttgtgcttgtgcgcgtgttcttcaccctcttggtaccagtgtgtggcctggaattgctgtcttggttctttctctatcactggttggttctccctccgtctccatctatcatgtttgttagtccctatactactgacaaaaaagttcaccagaggccctaatgctgccacatcagcgccctctaaagttgccatatcagcatcctcatctgccaagtcggcacagcctgcccaatcgcatccaagcaacagatagccctcctgggcacccagccaatggcagctcccatggccaaatctcagatgggcccacagcatcctccgatccccatttccatccatttaaactagctcaccttttcctccacaaacgcccatcagccatccccctcctgcaattcttcctctgaactgtgggtctgcggca

SEQ ID NO: 392 - DNA, 2118 bp, Setaria italica
  source 1..2118: mol_type = genomic DNA
ccacttgaatctctcctcttttatttaaggactgctaatttcttagtttacttggtctacccttttgcattgtccctcttgccaatacgtttccagtgacagaaaactcacccaacttaactatatattggcagggaaaagaagaagagagaggaaagatcagaaactccaaagccgaatgaagctgttacgaaatttgatggagacctttattccatgaggcattaggtcagccttccgcagaggagagtttccgtggataacagacttaacagtaacctctggactgtattgagagaatatcgatcatcccctttcaccacagagacatctttggctgctcgtcgtgtggtgtagcgttctgccgtacaaagtatccagattattcttgctattgaacagatatttgtattttctcatgtatcttcaaatgtattcattctcaccgcttgttcgaaagtatatgaagaagtatgtgggaaccaatgttactcgtaagcagagaaatatagctttcctcttttgtattttggtggagatgtattgtggtgaacatgaaatcagttgatgtgttgtttgtctgaatttctatgtacctggcacagtgaactggaaaatatcttaggtggaaagcacaagtcactagaccatttgcgctggattcacctgtgtgagaaaactgcaacattttcactttgttagctaggaagcaaggccatgttccattggctgcctggctgggcatttttaggactgctccgcttaaaaaaaaaataacttcactccaccaacttaaagctccactccaactaagaaaatagggagctacgaggttaatagtgtaaacttcagctccaaaaattataggaattggcgagaatggtctctcttgcccttggttgggattgatgtttttttttaccagctacgttaaccgactgctacagtaccgatcgctacggtaacactttgctacatcgcttcgcctactttgcagacttcattgtgcgcagctgaccgttggaatttttctggaataaaactccgcgtcattgtaataaaggatcacttttgaaaaccagcacgatcgtcatgtgttcgtatgaggtcattcggtagtccatgatactgaaagtgatttgtatccttttccaaaaagaatccgcagaaatcttcacaaagtaagttgatttggactaccataagaaatccagtgctctcaaatgttgcagaatagtttacgtcatacgcgttgaaaattatgccacccgaagattgcgaccatcttaaagcattgaaaattgatgtggcctgcgacattgggcccaggagatgaatcatccagcatttcagcaaaccgggctcaccaaggatgcagatgaccaaattggggtgaaatcggacgccagaggaaggggagatggcggcgacgacggaatagaagagtgtgagagggagggagaggcggcagcgatggaagatgaacaagcacggggaggtgtcaatcttttttccccctaaatcggtatgtgtaattggtgacattagtgagtaattttcaactaacttctattggaatgaaacttgtattttcgaagcaccctttgagaagctccagaaaaaatcttgaagttagctcctagatgcatattttttccttgaagttagtattattagagctagaaatgtttggcaagataattttaaagtggagttagaaaatctaaagcgaagcggtccaaacacgcctttgagatccgttaccgtcaacaacagaagcagagagcttcacgcccattttgagttccaaaaccacgtgatctccaaaatcattttggccgatatttcccagccccaggcactccgaagaccacaaatctcaggcgctccagacgctctcctcccaatcacggccctccacgtgtcccgaggccctccgccagcagcccatccattggaccatgcagataagacccggataaggcagagcccatcgctgccgtcaaatagatcacatccgtcccagggccgtccgatctgccacgcaggagatagcaccggaactctttcttatttgtaccccgggacgagccctctccacgccacacaccaccacca

SEQ ID NO: 393 - DNA, 2080 bp, Setaria italica
  source 1..2080: mol_type = genomic DNA
ggactgctaatttcttagtttacttggtctacccttttgcattgtccctcttgccaatacgtttccagtgacagaaaactcacccaacttaactatatattggcagggaaaagaagaagagagaggaaagatcagaaactccaaagccgaatgaagctgttacgaaatttgatggagacctttattccatgaggcattaggtcagccttccgcagaggagagtttccgtggataacagacttaacagtaacctctggactgtattgagagaatatcgatcatcccctttcaccacagagacatctttggctgctcgtcgtgtggtgtagcgttctgccgtacaaagtatccagattattcttgctattgaacagatatttgtattttctcatgtatcttcaaatgtattcattctcaccgcttgttcgaaagtatatgaagaagtatgtgggaaccaatgttactcgtaagcagagaaatatagctttcctcttttgtattttggtggagatgtattgtggtgaacatgaaatcagttgatgtgttgtttgtctgaatttctatgtacctggcacagtgaactggaaaatatcttaggtggaaagcacaagtcactagaccatttgcgctggattcacctgtgtgagaaaactgcaacattttcactttgttagctaggaagcaaggccatgttccattggctgcctggctgggcatttttaggactgctccgcttaaaaaaaaaataacttcactccaccaacttaaagctccactccaactaagaaaatagggagctacgaggttaatagtgtaaacttcagctccaaaaattataggaattggcgagaatggtctctcttgcccttggttgggattgatgtttttttttaccagctacgttaaccgactgctacagtaccgatcgctacggtaacactttgctacatcgcttcgcctactttgcagacttcattgtgcgcagctgaccgttggaatttttctggaataaaactccgcgtcattgtaataaaggatcacttttgaaaaccagcacgatcgtcatgtgttcgtatgaggtcattcggtagtccatgatactgaaagtgatttgtatccttttccaaaaagaatccgcagaaatcttcacaaagtaagttgatttggactaccataagaaatccagtgctctcaaatgttgcagaatagtttacgtcatacgcgttgaaaattatgccacccgaagattgcgaccatcttaaagcattgaaaattgatgtggcctgcgacattgggcccaggagatgaatcatccagcatttcagcaaaccgggctcaccaaggatgcagatgaccaaattggggtgaaatcggacgccagaggaaggggagatggcggcgacgacggaatagaagagtgtgagagggagggagaggcggcagcgatggaagatgaacaagcacggggaggtgtcaatcttttttccccctaaatcggtatgtgtaattggtgacattagtgagtaattttcaactaacttctattggaatgaaacttgtattttcgaagcaccctttgagaagctccagaaaaaatcttgaagttagctcctagatgcatattttttccttgaagttagtattattagagctagaaatgtttggcaagataattttaaagtggagttagaaaatctaaagcgaagcggtccaaacacgcctttgagatccgttaccgtcaacaacagaagcagagagcttcacgcccattttgagttccaaaaccacgtgatctccaaaatcattttggccgatatttcccagccccaggcactccgaagaccacaaatctcaggcgctccagacgctctcctcccaatcacggccctccacgtgtcccgaggccctccgccagcagcccatccattggaccatgcagataagacccggataaggcagagcccatcgctgccgtcaaatagatcacatccgtcccagggccgtccgatctgccacgcaggagatagcaccggaactctttcttatttgtaccccgggacgagccctctccacgccacac

SEQ ID NO: 394 - DNA, 2090 bp, Setaria italica
  source 1..2090: mol_type = genomic DNA
ggactgctaatttcttagtttacttggtctacccttttgcattgtccctcttgccaatacgtttccagtgacagaaaactcacccaacttaactatatattggcagggaaaagaagaagagagaggaaagatcagaaactccaaagccgaatgaagctgttacgaaatttgatggagacctttattccatgaggcattaggtcagccttccgcagaggagagtttccgtggataacagacttaacagtaacctctggactgtattgagagaatatcgatcatcccctttcaccacagagacatctttggctgctcgtcgtgtggtgtagcgttctgccgtacaaagtatccagattattcttgctattgaacagatatttgtattttctcatgtatcttcaaatgtattcattctcaccgcttgttcgaaagtatatgaagaagtatgtgggaaccaatgttactcgtaagcagagaaatatagctttcctcttttgtattttggtggagatgtattgtggtgaacatgaaatcagttgatgtgttgtttgtctgaatttctatgtacctggcacagtgaactggaaaatatcttaggtggaaagcacaagtcactagaccatttgcgctggattcacctgtgtgagaaaactgcaacattttcactttgttagctaggaagcaaggccatgttccattggctgcctggctgggcatttttaggactgctccgcttaaaaaaaaaataacttcactccaccaacttaaagctccactccaactaagaaaatagggagctacgaggttaatagtgtaaacttcagctccaaaaattataggaattggcgagaatggtctctcttgcccttggttgggattgatgtttttttttaccagctacgttaaccgactgctacagtaccgatcgctacggtaacactttgctacatcgcttcgcctactttgcagacttcattgtgcgcagctgaccgttggaatttttctggaataaaactccgcgtcattgtaataaaggatcacttttgaaaaccagcacgatcgtcatgtgttcgtatgaggtcattcggtagtccatgatactgaaagtgatttgtatccttttccaaaaagaatccgcagaaatcttcacaaagtaagttgatttggactaccataagaaatccagtgctctcaaatgttgcagaatagtttacgtcatacgcgttgaaaattatgccacccgaagattgcgaccatcttaaagcattgaaaattgatgtggcctgcgacattgggcccaggagatgaatcatccagcatttcagcaaaccgggctcaccaaggatgcagatgaccaaattggggtgaaatcggacgccagaggaaggggagatggcggcgacgacggaatagaagagtgtgagagggagggagaggcggcagcgatggaagatgaacaagcacggggaggtgtcaatcttttttccccctaaatcggtatgtgtaattggtgacattagtgagtaattttcaactaacttctattggaatgaaacttgtattttcgaagcaccctttgagaagctccagaaaaaatcttgaagttagctcctagatgcatattttttccttgaagttagtattattagagctagaaatgtttggcaagataattttaaagtggagttagaaaatctaaagcgaagcggtccaaacacgcctttgagatccgttaccgtcaacaacagaagcagagagcttcacgcccattttgagttccaaaaccacgtgatctccaaaatcattttggccgatatttcccagccccaggcactccgaagaccacaaatctcaggcgctccagacgctctcctcccaatcacggccctccacgtgtcccgaggccctccgccagcagcccatccattggaccatgcagataagacccggataaggcagagcccatcgctgccgtcaaatagatcacatccgtcccagggccgtccgatctgccacgcaggagatagcaccggaactctttcttatttgtaccccgggacgagccctctccacgccacacaccaccacca

SEQ ID NO: 395 - DNA, 2119 bp, Setaria italica
  source 1..2119: mol_type = genomic DNA
ccacttgaatctctcctcttttatttaaggactgctaatttcttagtttacttggtctacccttttgcattgtccctcttgccaatacgtttccagtgacagaaaactcacccaacttaactatatattggcagggaaaagaagaagagagaggaaagatcagaaactccaaagccgaatgaagctgttacgaaatttgatggagacctttattccatgaggcattaggtcagccttccgcagaggagagtttccgtggataacagacttaacagtaacctctggactgtattgagagaatatcgatcatcccctttcaccacagagacatctttggctgctcgtcgtgtggtgtagcgttctgccgtacaaagtatccagattattcttgctattgaacagatatttgtattttctcatgtatcttcaaatgtattcattctcaccgcttgttcgaaagtatatgaagaagtatgtgggaaccaatgttactcgtaagcagagaaatatagctttcctcttttgtattttggtggagatgtattgtggtgaacatgaaatcagttgatgtgttgtttgtctgaatttctatgtacctggcacagtgaactggaaaatatcttaggtggaaagcacaagtcactagaccatttgcgctggattcacctgtgtgagaaaactgcaacattttcactttgttagctaggaagcaaggccatgttccattggctgcctggctgggcatttttaggactgctccgcttaaaaaaaaaaataacttcactccaccaacttaaagctccactccaactaagaaaatagggagctacgaggttaatagtgtaaacttcagctccaaaaattataggaattggcgagaatggtctctcttgcccttggttgggattgatgtttttttttaccagctacgttaaccgactgctacagtaccgatcgctacggtaacactttgctacatcgcttcgcctactttgcagacttcattgtgcgcagctgaccgttggaatttttctggaataaaactccgcgtcattgtaataaaggatcacttttgaaaaccagcacgatcgtcatgtgttcgtatgaggtcattcggtagtccatgatactgaaagtgatttgtatccttttccaaaaagaatccgcagaaatcttcacaaagtaagttgatttggactaccataagaaatccagtgctctcaaatgttgcagaatagtttacgtcatacgcgttgaaaattatgccacccgaagattgcgaccatcttaaagcattgaaaattgatgtggcctgcgacattgggcccaggagatgaatcatccagcatttcagcaaaccgggctcaccaaggatgcagatgaccaaattggggtgaaatcggacgccagaggaaggggagatggcggcgacgacggaatagaagagtgtgagagggagggagaggcggcagcgatggaagatgaacaagcacggggaggtgtcaatcttttttccccctaaatcggtatgtgtaattggtgacattagtgagtaattttcaactaacttctattggaatgaaacttgtattttcgaagcaccctttgagaagctccagaaaaaatcttgaagttagctcctagatgcatattttttccttgaagttagtattattagagctagaaatgtttggcaagataattttaaagtggagttagaaaatctaaagcgaagcggtccaaacacgcctttgagatccgttaccgtcaacaacagaagcagagagcttcacgcccattttgagttccaaaaccacgtgatctccaaaatcattttggccgatatttcccagccccaggcactccgaagaccacaaatctcaggcgctccagacgctctcctcccaatcacggccctccacgtgtcccgaggccctccgccagcagcccatccattggaccatgcagataagacccggataaggcagagcccatcgctgccgtcaaatagatcacatccgtcccagggccgtccgatctgccacgcaggagatagcaccggaactctttcttatttgtaccccgggacgagccctctccacgccacacaccaccacca

SEQ ID NO: 396 - DNA, 381 bp, Setaria italica
  source 1..381: mol_type = genomic DNA
aataagtttagagacgaccggcgcaatttggttttttttcccacaacaactgatgtacacatcgttctcataaaggcttccaatcaattgtggtttgtgcattgcttaataaatgtcggttagtgcactatttcactagtaaaatttaggacatgctggttgttttcatgtaatttattcaaaatttcttgtatttcagttagaagaagaagaactgcacgaggaaaagaagaagaagaataagacagggcccagcagtgcattttcaaatcttttgttgccaatgattgagtcatctttacaaggaccacgacgaatcttctctccgaggaactcctataaataccggcctgcagctcggatccatcatcacacaacaca

SEQ ID NO: 397 - DNA, 3308 bp, Setaria italica
  source 1..3308: mol_type = genomic DNA
cctaaggtaggttagtaaagagattaaaaatggtgggttaatctttatgggtagtttagtgttggcttgcaactttatcatgaaaataggttgtatagtcacttgttggcttgcaactttatcatgaaggaaagttgtatagtcatgtgttcaaaagtttgcatctctaacccctgcatgtactaaatcgtagacactgaagctccaaaagtggaattcttggatttctctgaagaaccttcggagtttgaggagatttttgagttgatcccctgtgaagccggaccttcggacaacactaacctttttacagatcaaggcaagccccggtgcatctatacctacctactttggagttattatttcatgtgttcaattgttggttattttccgtatgaatgcattaagtctaggagttgattgaaacctattcttgtgcatgatcctacctgatttagaggacatctttgccacttgttcactaattagtaactatcctatgcttagcaatgcttagatacttcaagcaacttggattgcttagctctaaggaaaattttggtcatacatgttagttaaggaaaaatagcctggaaattggaaatgcagacagaagctagagatggtagttctgtttgctaagttaatttggttaaggcccgatcgttgtcttaacctttgatcaagtgagttctacctggttgcttactgggtatgggaccagtaaagcccggtaggttagttggctctttgatcgggaatatttcgtacccgtgcttgacgtgctggagaatggtaggggcatagcctgaaactcacatggagatcaggccagacgtggggtcccatgtggggtgcgtccctgggttcgggtagtcatgttcccaatttttgggtacggctaatagaaaggtcattatatgcaacctagacagttgtacatagctggtggttgggtatctcctgcaggatgtaaattgatccggatcgccgcaattctcggatatgaatgcacttgatcaccgttaagcatcatactgtaatccagttgaatataatgtttttcctagaatgaatatgctgtatgacttagttccactgagtgctcaaaatgttttattcatctagactggttaggtaacaactaaacaaaaataaaagaataaagttaaggttccacttatagtaagcctttccgcaaaaatgtgagtccgccagtatactaaacagctatcattcagtttttggaaaaaaaaaactatctatattggttaatcgggtcagtcttgctaagtaccctcggactcaggggaatccttcgttgctatttcagaactacagcaagagtccgccgagggagaagccccgaagaattagggtatttttacgagtctcataataccctagaaataaaactcagatgtttaactttcacctggactagtttatgttttaaactcttagaactgttctgacctgcattgttaagtttgtttcaaattatggttgtaataattcgcacctcgatatgtatgtaaaaatgtaatatttgttgataccttcccatcgtggaagtgatcctgatgtatggctatggatcacgtcgtggatgtttcgaggagtcctaaggacactcgacggaataccggacttagactgttttaagtgcgtttcggataattgttgttctgatagcgattagacgcgcttaaaccagtttaagttgggcggttccgccacactatcccttattactgattttggtttggtttgggtccatccgagatgaagaagaggcaagcacatgtactggaataatattcctggatcgaaggtatgagcatcacacatttaaatgctagtattaagaagaggcaagcacatgtactggaataatatccgagatgcaagtttacaacaataactctggcattgcatcacctgctcaacccatgtccaatcacatgataatcctaccaaacttagcacgagctgaattaaaattttccttaatccgttttatatatgtacaaatgccaccattgccacataaatgcataagttcttcccagataattctataggccaccattgctattttataagaatccttcagaattttaagctgaaaggaacttgactaaaggaggaacaacaaggatagagtctagtgctccatcccatgctacagattttagttcagttttcaaccaacaagaattaaaatttattttctagcaaatgaaaattcaagggtcattttcttaaggtttgaagttataccattttgcatatatatcataagtatacaaactttagccatataatttttgctggccacaccttggctactttataaagaccctgcacaattttaagataaaagaaattcggcaaattaaagggagaaacaacaaggaacgagtcaggtgccccatcccatgtttccatcgagatgaagaaggggcaaagcacatgtacttgaatatattggatcgaaggtattatcagcatcaaatatttgaatacgagtagtattaataactttgagcagcgcggaaggttcttatggcctcagtgatagctaatctaactttacaatatctctgacattgcatcacatgctcatcccatgtcacatgataataatcctaccaagctcagcacgagccacatgaaatttcttaatcctttttttatatatatataaatgcaaaagattggatcagagcaagtagctaagtatcctgcatccctcttcatgtccatgaatcatatccccgatgaaccacataacctccttttattctttcaaaacaagttaaaaaattttgttctagaaaatgaatttttaactctggttttcttaaggtttgatttttttgcgtctatatataagttctttacagataactgtacctttgctagtttatatgaatcctgcagagtttcaaggtgaaatttaaggaacttggaagtgggagaaactgaggatcgagtccagtgctttatcggtttatcatcccatactaatgatttctttttgttcagttgcatgttgcaaccgggatgacgaatcgaatatgcaaatcacatgtacagggtttactggcatcttttttggatcgaaggtacgagcaccgcatttgaatatgagcactgacgttaagcttcgttagtgggtgaggttttgcactgtgtaaatttctctactcgtgattccagtgatctgcataatgtcaacggccgtataggagcaactactatttaagcatccattcgcccatctatttcgatcaacgctcact

SEQ ID NO: 398 - DNA, 1139 bp, Setaria italica
  source 1..1139: mol_type = genomic DNA
agtgctccatcccatgctacagattttagttcagttttcaaccaacaagaattaaaatttattttctagcaaatgaaaattcaagggtcattttcttaaggtttgaagttataccattttgcatatatatcataagtatacaaactttagccatataatttttgctggccacaccttggctactttataaagaccctgcacaattttaagataaaagaaattcggcaaattaaagggagaaacaacaaggaacgagtcaggtgccccatcccatgtttccatcgagatgaagaaggggcaaagcacatgtacttgaatatattggatcgaaggtattatcagcatcaaatatttgaatacgagtagtattaataactttgagcagcgcggaaggttcttatggcctcagtgatagctaatctaactttacaatatctctgacattgcatcacatgctcatcccatgtcacatgataataatcctaccaagctcagcacgagccacatgaaatttcttaatcctttttttatatatatataaatgcaaaagattggatcagagcaagtagctaagtatcctgcatccctcttcatgtccatgaatcatatccccgatgaaccacataacctccttttattctttcaaaacaagttaaaaaattttgttctagaaaatgaatttttaactctggttttcttaaggtttgatttttttgcgtctatatataagttctttacagataactgtacctttgctagtttatatgaatcctgcagagtttcaaggtgaaatttaaggaacttggaagtgggagaaactgaggatcgagtccagtgctttatcggtttatcatcccatactaatgatttctttttgttcagttgcatgttgcaaccgggatgacgaatcgaatatgcaaatcacatgtacagggtttactggcatcttttttggatcgaaggtacgagcaccgcatttgaatatgagcactgacgttaagcttcgttagtgggtgaggttttgcactgtgtaaatttctctactcgtgattccagtgatctgcataatgtcaacggccgtataggagcaactactatttaagcatccattcgcccatctatttcgatcaacgctcact

SEQ ID NO: 399 - DNA, 1140 bp, Setaria italica
  source 1..1140: mol_type = genomic DNA
agtgctccatccccatgctacagattttagttcagttttcaaccaacaagaattaaaatttattttctagcaaatgaaaattcaagggtcattttcttaaggtttgaagttataccattttgcatatatatcataagtatacaaactttagccatataatttttgctggccacaccttggctactttataaagaccctgcacaattttaagataaaagaaattcggcaaattaaagggagaaacaacaaggaacgagtcaggtgccccatcccatgtttccatcgagatgaagaaggggcaaagcacatgtacttgaatatattggatcgaaggtattatcagcatcaaatatttgaatacgagtagtattaataactttgagcagcgcggaaggttcttatggcctcagtgatagctaatctaactttacaatatctctgacattgcatcacatgctcatcccatgtcacatgataataatcctaccaagctcagcacgagccacatgaaatttcttaatcctttttttatatatatataaatgcaaaagattggatcagagcaagtagctaagtatcctgcatccctcttcatgtccatgaatcatatccccgatgaaccacataacctccttttattctttcaaaacaagttaaaaaattttgttctagaaaatgaatttttaactctggttttcttaaggtttgatttttttgcgtctatatataagttctttacagataactgtacctttgctagtttatatgaatcctgcagagtttcaaggtgaaatttaaggaacttggaagtgggagaaactgaggatcgagtccagtgctttatcggtttatcatcccatactaatgatttctttttgttcagttgcatgttgcaaccgggatgacgaatcgaatatgcaaatcacatgtacagggtttactggcatcttttttggatcgaaggtacgagcaccgcatttgaatatgagcactgacgttaagcttcgttagtgggtgaggttttgcactgtgtaaatttctctactcgtgattccagtgatctgcataatgtcaacggccgtataggagcaactactatttaagcatccattcgcccatctatttcgatcaacgctcact

SEQ ID NO: 400 - DNA, 1726 bp, Setaria italica
  source 1..1726: mol_type = genomic DNA
tggtaaaatcaattcatatgcttatacttcaaaaaccaatttatgtgtatatacttggaaaaattagattaagtatttcaatttatttgcttatatttcaaaaataaattcttgtgcatatacttagaaaaattagattaagtatttcaatttatttgcttatacttcaaaaatcaattcttgtgtatatacttacaaaaattagattaagtatttcaatttaattgcttatatttgaagtaagtcaattgtgcaaacccattgatctactatatatgtaataaactttgccaatgacacagatgatgtacaggaaagatagaatcttcaagtggatttcttctagacgaggtcataaatccagcgggggagtttcataatgatgcatcaaatctacagcaccgtcaggactcgggtttagaatagtagaaatgatatgtgtacgcacaatatgtctatatatatgtataatattattcatatatgtgtatgcataatatgtatatatataatagtatcttaaatgtaatattgaagataaatagaactttatatatattagcgtattagaagtagtatacgtatgaatatagaataaagaaaaagaaaataagaaaagaaaggaaaaaaacaaatcagtaccggtcggggagaccaaccggcactaattaggccctttagtgccctcccgccaccctctcctccctcttctctcgccgccctctcctccctctcagctcttcccgaccccttcctctcccactgccgccccctccctctctccgccgaccaccatcgtcctgcgtgatctccctctcctcaccctcggctgcccctcctctcccccttcgctcacccctcactcgtggcagtgaggagcagcggcaacacatagatccggtggtggcagtgcaggttccagtgaagaaggagctagcacggatccgacgaagaaggagctggttgcggtggcgtaggtgggcggccctggcggcgcggcctcagcttcctctccccgtacgcctctctctctctctctctatgagccggatccggtaggaccaaggcagttggcggctggtggggcggcaacggccagatccagcgagatgcggccggtcggatccggcgaggcagcgcaaggccggggcgtaaggcggccggcagcaccatttttttgtttttttaataggccttcaccgccagttccaaaaccagcggtgatggggtatccccatcactaccgaaagtcagacgatggatccaaaccgacggtgaagactggtttggagccggcagtgatgaacctctggagtagtgcttatggctgggggcattgacattctttttactaactttcttcctaccacgtagtatgcaataattgtacgtaatactagtagctgatgataagtttgatataagactatcaagcggtctcgacatttcacaatctcgtgcagcacatggacagctatactaacgagaagtcgaggacgacagcccaccgacttgacaaatctgtacaaaatatgctagaaaaatattgcaccaatcaaacattgcccatcaaggccaccaaggatacatgatgacaacggccaatcagacttcaaagatatctcaacatcatacacacagaaggaagagatgatgactccagtttaactttcatcgacgactcctataaatacgaccctcttcctgtacgcctcctcattccaac

SEQ ID NO: 401 - DNA, 1726 bp, Setaria italica
  source 1..1726: mol_type = genomic DNA
tggtaaaatcaattcatatgcttatacttcaaaaaccaatttatgtgtatatacttggaaaaattagattaagtatttcaatttatttgcttatatttcaaaaataaattcttgtgcatatacttagaaaaattagattaagtatttcaatttatttgcttatacttcaaaaatcaattcttgtgtatatacttacaaaaattagattaagtatttcaatttaattgcttatatttgaagtaagtcaattgtgcaaacccattgatctactatatatgtaataaactttgccaatgacacagatgatgtacaggaaagatagaatcttcaagtggatttcttctagacgaggtcataaatccagcgggggagtttcataatgatgcatcaaatctacagcaccgtcaggactcgggtttagaatagtagaaatgatatgtgtacgcacaatatgtctatatatatgtataatattattcatatatgtgtatgcataatatgtatatatataatagtatcttaaatgtaatattgaagataaatagaactttatatatattagcgtattagaagtagtatacgtatgaatatagaataaagaaaaagaaaataagaaaagaaaggaaaaaaacaaatcagtaccggtcggggagaccaaccggcactaattaggccctttagtgccctcccgccaccctctcctccctcttctctcgccgccctctcctccctctcagctcttcccgaccccttcctctcccactgccgccccctccctctctccgccgaccaccatcgtcctgcgtgatctccctctcctcaccctcggctgcccctcctctcccccctcgctcacccctcactcgtggcagtgaggagcagcggcaacacatagatccggtggtggcagtgcaggttccagtgaagaaggagctagcacggatccgacgaagaaggagctggttgcggtggcgtaggtgggcggccctggcggcgcggcctcagcttcctctccccgtacgcctctctctctctctctctatgagccggatccggtaggaccaaggcagttggcggctggtggggcggcaacggccagatccagcgagatgcggccggtcggatccggcgaggcagcgcaaggccggggcgtaaggcggccggcagcaccatttttttgtttttttaataggccttcaccgccagttccaaaaccagcggtgatggggtatccccatcactaccgaaagtcagacgatggatccaaaccgacggtgaagactggtttggagccggcagtgatgaacctctggagtagtgcttatggctgggggcattgacattctttttactaactttcttcctaccacgtagtatgcaataattgtacgtaatactagtagctgatgataagtttgatataagactatcaagcggtctcgacatttcacaatctcgtgcagcacatggacagctatactaacgagaagtcgaggacgacagcccaccgacttgacaaatctgtacaaaatatgctagaaaaatattgcaccaatcaaacattgcccatcaaggccaccaaggatacatgatgacaacggccaatcagacttcaaagatatctcaacatcatacacacagaaggaagagatgatgactccagtttaactttcatcgacgactcctataaatacgaccctcttcctgtacgcctcctcattccaac

SEQ ID NO: 402 - DNA, 1738 bp, Setaria italica
  source 1..1738: mol_type = genomic DNA
tggtaaaatcaattcatatgcttatacttcaaaaaccaatttatgtgtatatacttggaaaaattagattaagtatttcaatttatttgcttatatttcaaaaataaattcttgtgcatatacttagaaaaattagattaagtatttcaatttatttgcttatacttcaaaaatcaattcttgtgtacatacttagaaaaattagattaagtatttcaatttaattgcttatatttgaagtaagtcaattgtgcaaacccattgatctactatatatgcaataaactttgccaatgacacagatgatgtacaggaaagatagaatcttcaagtggatttcttctagacgaggtcataaatccagcgggggagtttcataatgatgcatcaaatctacagcaccgtcaggactcgggtttagaatagtagatatgatatgtgtacgcacaatatgtctatatatatgtataatattattcatatatgtgtatgcataatatgtatatatataatagtatcttaaatgtaatattgaagataaatagaactttatatatattagcgtattagaagtagtatacgtaagaatatagaataaagaaaagaaaataagaaaagaaaggaaaaaacaaatcagtaccggttggggagaccaaccggcactaattaggccctttagtgccttcccgccaccctctcctccctcttctctcgccgccctctcctccctctcagctcctcccgaccccttcctctcccactgtcgccccctccctctccccgccgaccaccatcgtcgtgcgtgatctccctctcctcaccctcggctgcccctcctctccccccttcgctcacccctcactcgtggcagtgaggagcggcggcggggtgagagcagcggcaacacatagatccggtggtggcggtgcaggttccagtgaagaaggagctagcacggatccgacgaagaaggagctggttgcggtggcgtaggtgggcggccctggcggcgcggcctcagcttcctctccccgtacgcctctctctctctctatgagccggatccggtaggaccaaggcagttggcggctggtggggcggcaacggccagatccagcgagatgctgccggtcggatccggcgaggcagcgcaaggccggggcgtaaggcggccggcagcaccatttttttgtttttttaacaggccttcaccgccagttccaaaaccagcggtgatggggtatccccatcactaccgaaagtcagacgatggatccaaaccgacggtgaagactggtttggagccggcagtgatgaacctctggagtagtgcttatggctgggggcattgacattctttttactaactttcttcctaccacgtagtatgcaataattgtacgtaatactagtagctgatgataagtttgatataagactatcaagcggtctcgacatttcacaatctcgtgcaacacatggacagctatactaacgagaagtcgagaacgacagcccaccgacttgacaaatctgtacaaaatatgctagaaaaatattgcaccaatcaaacattgcccatcaaggccaccaaggatacatgatgacaacggccaatcagacttcaaagatatctcaacatcatacacacagaaggaagagatgatgactccagtttaactttcatcgacgactcctataaatacgaccctcttcctgtacgcctcctcattccaac

SEQ ID NO: 403 - DNA, 3508 bp, Setaria italica
  source 1..3508: mol_type = genomic DNA
ttttgggacgcgagcagctttagagctgggatgacggcctctcttcgtgtgctcgaggcgttgcgtcaccctaggttttccctaggccagaggtaagatagttttgcctgcggcaacgcctttagtattggaaaccttggctgctttcttcaaggctttctgctccaaatgaagaatatttttcttcgatgcctcgcgaacgggggcctcgacgctgaagaaggaaaagacacgattcccccaggatccacccagcctcctttgaacctctttgtactccgaaggagattcggcaccaagaataaaatcaccacgatctttaaccttaatggaattgatctctacaaaatgaagcgcaggaaaagttatgtaacgaagagaaagcatgaagaaaaatcaatacagaggaggacaagcgtaaagtcttaatttctttggtaaacttgaaacatttcgaccaatccgggcaagggataggccctttggtatccagtccagtcggagtccagaattgcccagctacagcggacaggccacactccaagcatgcggtactcctcgataatatcgcaatgctatacttgcaggcaaagagacgaagcatcgagatgaaggcatcaccctcggcacatgcgggagggtcaatcttgtaatcatcatgaagagcctccatctttttagtgacgaggcagttgggctcaccagtctcttcaggctccacttcatgatagagctagtgttgatgccaatcgataggccacttgttgcgatatgcagccacggggttcaagactccagtgcgttacatgaagttgagacatccaaactgagcttgtttcccgaccactccattagcacttctctccaacaagtacttcagctggtgatgcaccttgtgagcattagtgaaactgactgccgaggacttgatttttgttgttttgcaaatccacatatacgtcgaaagatgaacgagagcgttgggtgtcaactgatgcaggtagatatcatacagacggagtatatctataacaattgggtccaactcaaaacgaagaccaacataaaggagatcacggaagatgacgaccttgttgtcttcgggtttcggaataacctcagaattgggtgcacggctagcaaagaccatcttgttctgcttcagtaagtcgatgtcattgggatgaagcaagcttcagccaaaaacaacagtctttggcataatctgatcaccatcgtcacccgaagggcggttgcattttggggccattgaatacaatgaagaacacaattaagcaaccaaaatgaagtcgtcggaagaataccaaacccagtgaagggggctttagacctccatcaaagaaagcgatagcggtaaaagtaaatggcacgagcccacacagggttatttataggtagagcgaaagagaaacagtaacaagggtcaaaagtcaaaaaaccattaaaaaaatttaatgaaggatttcgaataaggaaaaatatattaatcaaagggcaaggaagcaaaatcatgcatgggccgatcttggggagttccgaaggatggttgcaccatgtgttttaggatcgtaagttcagcccatcagaggagaagatggccctcgctcacgaggggctactattggggaaaccaccttgggaatctccttcgaagggagaagtccttttgacactaaccatgacagctagtttgctttgtggcgagctctaagtgcagggaagaagaaggcggtacgaagagctcttaggcgtatgagggctccttcggaacaaaacaatggctgactggcccgcgggtcttttgggagggccggcatctgactcgtcccctccaaggtttgtcctcagaggaaaggcatggagtggctcagcaaagagcacctcgacttccgaagatgaacatgcgttgaaagaccatgctgtccaccacatggattgaaaggaccgtacgaggagctagctggaggagtccatacaaaagatttgcacttgaagaaacccaatctgtagatcataaagccaacgtccttggaaaaaaccgagaaatgatacatggcctcatagaggtgaataattcgaaatcactatcaattcctccaagacatgattgcagaatgaggctaacagaatccacattgagagggatggaggatcgcccaaaagaagccaccaagaaaaactcattggaagagaaggcgtgtgagcaactgactggcaaagagaaactggattggatcatgcattggatctccaaacctagaccaaagtccagatcagagaggccacccatggtatggtagcctagaggaaggatcaccatgatcgccgaggaatggagagcacgacaccggggaggagggggacatcgccagtcaccatactcgcattcttttagcgtctgctcatctccacctaccctcccctagtcccctatctagttgcagtgcccaccactagatggtgccaccacgctaacctaaacgtcaagtctctccttccccggcaccgccccctatctagttgcaatgcccaccactagatggtgccaccacgctaacctaaacgtcaagtctctcctgccccagcaccgcccatcagcaatcgttgcctgcccacaagcacgacacgatggcacttatggaatcctcttaataccaacactactccaatccaaaaatttaacattgcagtttgattttgctctcgacctaaagaatcacaaaaattaatttaggtgtctggaatctatgaagtgcgagagagtaattaataaatcatgtatatatgtccagttgttgtttggggaaacctgtctctgtgcaaaagcagggtcctttgcccatgtacttttactatcagtcaacaaggcagcattctctcataaaaccacgaaagtaaaggaaccaagaccatcacagactccgtgcatgagttatgacatgtaaaggaaatcagccctggacaaattcaattgcagaagtccacagaagactccatgtgtgagtaatgacatgtaaagccaaatcagcctggacaaattccgttgcagaagaccacagtagactccatgtatgagttaagagtatatgacatgtagagcatatcagcgcctggacaaattcccttgcagaagtttctcgatccacctcagctagtcacgatgcaatcaccttactttagcaaaagcaaaacaaactgagatatgcagtcacatccttaataaactcgtcatactaccctcaccctattatcaaaagtaagaacaacaaaatacttttcccatgtaccccatgctgaatatcatggaggcgatcatgtgggtccaaaaacagttagggaaatctccaaatttgactagatgccatgtcacctccagcttatctaccctccaactttcagttctgcaaatgacaaaaaccttattgatctgcacggtgtttgtagcatataagcactataaataggacctagatgaatgctcagccca

SEQ ID NO: 404 - DNA, 1015 bp, Setaria italica
  source 1..1015: mol_type = genomic DNA
cgcgccaaacgtcaagtctctccttccccggcaccgccccctatctagttgcaatgcccaccactagatggtgccaccacgctaacctaaacgtcaagtctctcctgccccagcaccgcccatcagcaatcgttgcctgcccacaagcacgacacgatggcacttatggaatcctcttaataccaacactactccaatccaaaaatttaacattgcagtttgattttgctctcgacctaaagaatcacaaaaattaatttaggtgtctggaatctatgaagtgcgagagagtaattaataaatcatgtatatatgtccagttgttgtttggggaaacctgtctctgtgcaaaagcagggtcctttgcccatgtacttttactatcagtcaacaaggcagcattctctcataaaaccacgaaagtaaaggaaccaagaccatcacagactccgtgcatgagttatgacatgtaaaggaaatcagccctggacaaattcaattgcagaagtccacagaagactccatgtgtgagtaatgacatgtaaagccaaatcagcctggacaaattccgttgcagaagaccacagtagactccatgtatgagttaagagtatatgacatgtagagcatatcagcgcctggacaaattcccttgcagaagtttctcgatccacctcagctagtcacgatgcaatcaccttactttagcaaaagcaaaacaaactgagatatgcagtcacatccttaataaactcgtcatactaccctcaccctattatcaaaagtaagaacaacaaaatacttttcccatgtaccccatgctgaatatcatggaggcgatcatgtgggtccaaaaacagttagggaaatctccaaatttgactagatgccatgtcacctccagcttatctaccctccaactttcagttctgcaaatgacaaaaaccttattgatctgcacggtgtttgtagcatataagcactataaataggacctagatgaatgctcagccca

SEQ ID NO: 405 - DNA, 1009 bp, Setaria italica
  source 1..1009: mol_type = genomic DNA
aaacgtcaagtctctccttccccggcaccgccccctatctagttgcaatgcccaccactagatggtgccaccacgctaacctaaacgtcaagtctctcctgccccagcaccgcccatcagcaatcgttgcctgcccacaagcacgacacgatggcacttatggaatcctcttaataccaacactactccaatccaaaaatttaacattgcagtttgattttgctctcgacctaaagaatcacaaaaattaatttaggtgtctggaatctatgaagtgcgagagagtaattaataaatcatgtatatatgtccagttgttgtttggggaaacctgtctctgtgcaaaagcagggtcctttgcccatgtacttttactatcagtcaacaaggcagcattctctcataaaaccacgaaagtaaaggaaccaagaccatcacagactccgtgcatgagttatgacatgtaaaggaaatcagccctggacaaattcaattgcagaagtccacagaagactccatgtgtgagtaatgacatgtaaagccaaatcagcctggacaaattccgttgcagaagaccacagtagactccatgtatgagttaagagtatatgacatgtagagcatatcagcgcctggacaaattcccttgcagaagtttctcgatccacctcagctagtcacgatgcaatcaccttactttagcaaaagcaaaacaaactgagatatgcagtcacatccttaataaactcgtcatactaccctcaccctattatcaaaagtaagaacaacaaaatacttttcccatgtaccccatgctgaatatcatggaggcgatcatgtgggtccaaaaacagttagggaaatctccaaatttgactagatgccatgtcacctccagcttatctaccctccaactttcagttctgcaaatgacaaaaaccttattgatctgcacggtgtttgtagcatataagcactataaataggacctagatgaatgctcagccca

SEQ ID NO: 406 - DNA, 2162 bp, Setaria italica
  source 1..2162: mol_type = genomic DNA
aagctagcacagattatattgtccacctactctgcatagcatttacaaagattatgccttcactttgacgtgaaagaatgaaaactggcacatcttttggtacatggatcggaccacctagtctccttgaagcacgtctgtgtgtttttcttctttcgaagttctagcaatggaatgctgagggaaaagaagtacaagaatggagcttctgaaactttgataatttcttcaccaggaaactttggtaacttctcaaagatctagcaagggtctgccgaccgaaaaggagtccagatcgagccggagtctcgattcctgattggattggaaaagagacgacggacgccgagattgatcatatccctaacctagctctgcctctaagctacaaaggtcgagtgcgaggctaaccgccgcggatcgattgagtcctcatcgcaatgaagaaacacaaagcatcgagctcacggcgcgcggaggcgcaataatggggccgaagcgaaagcgacgacgattgctgcaactggccgcaacggcggcggcgacggggctccgacggcggtgaaggcggtggcattgccggtggagttcctcaggtggttcctggcgcagagcagcgaggactaccgcgtcccggccctcgacgactactcgccgtcgctgggacgccgccgaggagcgggagacgacggtccgccgggtgagcgccgacgtccaggccacgaagtatggcttcgccgcgttccatgcttgggtccgcggcgtcgccgacaaggacggccgcgtcgtgctcgggcgcacgtccaaccctcgggagctgcaggagatcatcgacggcgagtgggcagaagcgaggtgggagctcggcatgggggatggagatggagttgtcgccggttctgatgacgctgccggcaaggaggacggtgagggcgccatggcgtcgtcgtcgtcatcgtccaagatgatgagggtcccacgcggcccgcatctgcaaaccctgtcgatctacctgtctctgatctaccagcgcatgacataagtttttggttagggtcgttcatgtcacgtatatccatgtcgtatctaacttaggcagtctcggtgggagtttcctgaagagtttcatggtcaataaattccatactacatgagcaattttgctgacttggtaaggtcgtaaagtaagatctttacgaggagattccattggcatccaaaatcccctacttgagtgaagtggttatgctcggagttaccttcacgcttcatgatatttgtatttcttaatatatacttaaaaatggactgtctactggtaacccaggtgttattctggccacaatcacccgggtgatttgtaggggaataacaccccggttttgaagtggaaaaaaaatccaggtgctgcaaagagatctgtcacctgaaagttctgaacctaagattctgatcagacgattaacaaaaaagattatataaacaaggaaaagcaaaatagctgaacatattttttctatggtcagccaaagaacaaataattctgggttagtggaaactctaaagatgcaaacacagcatgcaaatttacacagatttaaaattacgcaatatacaaattgaaattacagtaacaatatcactgtaagttacttactgtatagtgtaaatcattaagaatcctaatgtatatgattaagaatcctaatgaatatggaatactaaagttagttactaatataatgtataacgaaaggagagaggcaggagagatccttggcaggcaggcagagggtttgaatgaggagcaggtccggtcgtcagaccgcaaactgctgccaaaaaattaaatgcgctgcgatctcgcaaagataggatagcaccccccaccgctgtgtctactggtactccgactcgcaattatcacggggcggcgtacccgccgcctgcagaaaagaagcccaactttgatttggatcagaacggaggaaaaaaaacagatcgtcagatcggacggtgccaaattcaggtgacaggagctcgtgaatcacccaagcaacgtatagcttttccccttaaaaaagtatgtcaacctatgtacgatgtagagttactagtcgtgacgaaacaaacatttaccaaacacacttgagcagatagat

SEQ ID NO: 407 - DNA, 2161 bp, Setaria italica; identical to SEQ ID NO: 50
  source 1..2161: mol_type = genomic DNA

SEQ ID NO: 408 - DNA, 1899 bp, Setaria italica
  source 1..1899: mol_type = genomic DNA
ctgaagattcctgtgggaaaccaactgatgtagtttctaaggaaacagagttgaagaagagtgtttgctcaagctagacctattaatcaatggttttgtcatgtcacagtcttctgtctcaggaacgaacactgcaccaattcagcagttgctgagctttagcaacacacgtgaagtggaatctcaatgtgctctgagagtctgagtttcacaatgagaagaaagaagtgaataagggatgtggagtaggagtatgcagtcattcatcaatggctggcactatagctggcatgttggttcctgatttacatctacagagacacatcaaactaagtttgacactatgtttgactaaatcagaagccaacctcatccgaatttaactgttggtagtattcccaccatctttggcatgaatttgctgccaaagttatatttatcatgtacgtgaacagattatatcactgattttatggtcattggcagggatgattggatcatttcaaagatgcaattttttctccttgtgacattattcacattagtcccagacatgatcaattggagtacagtaggaaaatgattctttgtacagaatttaccatcatctgtaatagacagtataacagatgcttccagtgatatgtccagatccaaggtttgcatgtgttagaaaacaccatgcacagcatcttggtgatagtggaactttttgtttgtattagtattatatctcccccctacaaaatgacaaaatgtttgtatacgcactggccgtttgcgtttgtatgcacgtatttctccaaactctgatagttacagcagtccatccaatttagttttatgcagtctgaaatccttttcatatacatttatgtgcttgcaaacattctgtagctgtccagcttttgtgattcaattgcaagatccctttcattttcatcgtactttgtttctttccttttcattgagatctttaggtgctatgaagccaatttgctccctggtaccaaagtttattgcaagaggcagaatttcattttcttcctttttgcccttcagtatttcagaactatttttactatgcaagatatgatatttgtaccttctttcttctcccagttggtctgttaatgtcagagcactttgtaaggccatgaggggggaatatgctgctgtatggttggaatcctgttggtggcatttttggcagggagttgttcaaattagtggtggatgtccgctgcaagcctgcaactggactccagaagcagcagcatattctcaggagcaaggatgtgtgtcaaagaaggaaccctgcatgcaacaaacaacggacggctggaggttgatgtgtgttaaagaaggaaccctgcatgcagcaaacaacggacggctggacgttgttatcaccaaaatactggctgtaaaatcttgtgttttttcgggaataactggcaacgggacaatttcatggatgcagtatatcagggcatctccgccgttggaagacacgtatgggctacagttcttggtgaaatccacccatagaaacccagaagccaggatccatcttaaggccaagaatgcgcagacaatattcaacggaccacgttgcacaaagaggaaaatgtttcttttgccagttttacatggtacacagaaaagagaggagaaataaagtatctgccagagccaggacaaaagagagggtggcaagaggattgcaggaatccagaaggctagcctccacctcacaattcatatctcttgtccttgtgtgcctccagttgcgcaaccttatatgccagccggtgcaacacttctcaagcccctaaggaaagattgtgtgtcaaggaaaggatagtgcttgtctccttgtgttcaggaccagaagca

SEQ ID NO: 409 - DNA, 1998 bp, Setaria italica
  source 1..1998: mol_type = genomic DNA
ctgtcactgtctcatttgcatcaccactagctcgatcactagattcagagaacacgcgcaaccgaacgagctgaggcaaagatgcatgaacagaggcatacatgtcccgtgccaagcagctggaacaagcatcccgtcgccccaggttctcatgatctgatctgccatccctgcagctgcagccatcgtctcctggcccagccaaacccccttgacgaatcgaggtaggtcgctcacatggacctcgtgcagtgaatgggattcaaggatcctccgaaccgatcgctgcaagtggttgcaggagggagagagaggggcctaaaagagggggcagaaaggagctgcgcgcgttgccaatccgagcgagatgcccgaaacgaggcgggtgaaaacccaggggagatcaggacgagatcgtgttgggagcgcgtccaaatcatcggagatcgccgaggggtcgtcgaggggagaacctactgtgaagaaagctcgtgcgctttgtcctggctcgctgagattgttttggtcggccccagcctcactccccagatgtggaaactgaacactggggctccattattgtgccctctgtatagaaaccttggcaggccaggggaccagattaggtgctcctttcctttgctttgttcattcatctgtgaacactgaacacaaatgttattctcttctgatcctctggtgagtttacatgtggaggcaggttttctttgctgatgcaaactggcttttgttcgttggataggattccaagcgatacactttcgaggcagttctttgcgctgagctaacatgttgttttctagtttcagcctttcaggacaactatgcttgtaggatatatcatgggtcatggccgaccatcccttggcaagcttcacatttatgctggcctaaaaggaggctcttgtaaaattatttcacaacagtttaaaagttcaacgaaatgataatacagtttcaacaataagctcaaaacatccagtgatttttttaatgtatatataataaggaatgcaagaaaaacattataataggttgacttggctagagaactatccatggtgtttactgatcggtggtgcatgtccatcatgcagactggcagtttccaacgagaagttcagttcatgcagccgttcaagagggcctttgctcctgctatcgtgggcggctactcctccccctgcaacctcggaggagacagcgggtgtgattcgagagaaccgggagcaaagtggagcgaggattagggcggcgggttagctggccggggcgaacggagaggaacaagattcgatccactgccctgcgccaccccctgtgttctcgctctagatctccccgctcccgagactcccggccaccgcccggccggctcacaccacgccactcgcggacacgctgctcctctcggctcccacctataaatacgcccctgctcatggcgctcccctctcagccacatgtgtcctcgatttggtagcttgcaagaaccctgctgcgaccccgtgttgcgttgattcctcctcctcctctctcgagatcctggcagggagtcgatccccggccggttgcgaaatcggtggttgaattgctcttcactgctctcggggtttgttgtctttgagcggtggctctggaatagtctgtttctgttcttgttccttctcatctctcccttgatgcatttctccttcttggactcgtagaggtatctgtccacatcgaccacaaaattgatcttgcggcctctctctagcttatgcggttctgaattctgcctgttcttcattgatttgttctgtgcggtcactcttcagtcttcactgtcttgagttcatgaagctgggaactccaggcatatcagcccgcatttacttgttgaatccgtttctccttctgtgacgggagaagaagaaagaacccccggcagaactctcgtctcaattcgattggttagatgcaaagagatggtgc

SEQ ID NO: 410 - DNA, 1998 bp, Setaria italica
  source 1..1998: mol_type = genomic DNA
tggaaatgaaattgtagaatgatgtgaaataatagtatataaaaaacagaaaaaaaataggcccggagtacttgctttacgcatctgttagatgatcgatgaggcattcatgtcacgatctttagggatgagtgttcagtttggctattttaccttttatgaaatacaataatatatcacatacaaaccgctaatatttggaattctataaagtgagcaattttcaggtctgtcagacttgcatcaccactcaaagttcgtcaacctgtcaggcaaactcctgaagatttccaaatactctgccaaacatcattgcagcaggaatgcagtagaagaaacacattgtgcgtgatattattcgttcgcgtttggcaataatttttgcttgaagcattgcattggtcgaaatagatgtgccatcatgagtacgaaacctgaaattattctacctgaaactaactatgctaccagttcagatagaaattgtgacaacactcaacatgaagttccgctgcttgcatcgcatcggcattgtaggcattcaacattcgatggagcagagagaaatcaggagcagccgacattgttgccagctttgccatcaggagcagggagataacgcggcaatgctggtcgtgcgtgccaccccgtggacggcccttccttggtctactccagcacggtgcccttcgccgctgcctggtacgaaacaaggaggacaagaaggacctcgcgcaatgagtcgccattgcaggctaacgcggtgaatttgccccgtcgcatttccgacggggacggtgtacgctggatggatgacgacggcgccgaccgcgtccgctgcggcacggtatgactgatagaagtttgcatattgattattgattattaatcatgatccgcaggcaccgacgacggccgtgcacctcccgccgccatcctctagcgagtagagtggcaggcggagtctccagcagctcagatggatcttgcgatggtgtagatgccgctgccgccgcccccagtgcacgtgcgagtgattggaaatgaagagacaaggagtaaaaggaaagaagataaggataattaagaaagatttgatatatttcaacaatatcattttacacattctccaatcatacctttatactatctatactactcatgcatactacctatactacaacttaaggttttagcagtatacaattaatctcaaccgtcggacccttacatatgagtcattttcgaatagtagtataaggtagtattgtgtaccgtaaaatacctctccaaatttcccaccagaagagcagcaggatgttcctcatccctttttaaatctgttatttctgtgtccaaaacccattcttgagtttattccaattgcattgtgccaaatatcatgttaatgtttttttaagtagcaaaagagggaggcatatcatgatatcaatatatcttaatgaggcatattgaataccaaagcatccacaaattgcagacctaaatcttgtgctaccaattccagttcattgatggagcatgatcgagtaatcttttcagctcagtttaggagaaagctaagcacaactccttgtatggtttaaaatagttacacttttttacttttcatggttttcctatattcaatatttaaaaacctcacaaaccacctctttgttgcagttcgtcaaaatggcaatgtttagtttctacaggatggtttcaattggcataattaaagatgctagagtctgagtgtctgaccatcgaaacgtcatgtggttgatttccaaatgaccagatcacacaaattttagacagtggagtgcaagtctacaacactccaatctccaaactcacaccctttgtgcctcattccgtttcagttattctcgcagcgcaccttgaagcttccctaacgcatgactccgttctctcccaggcctccctaaaaccatgccaagaactcccgaaaaggctttctagttcacagaa

SEQ ID NO: 411 - DNA, 2144 bp, Setaria italica
  source 1..2144: mol_type = genomic DNA
actatagggcacgcgtggtcgacggcccgggctggtatcggcgaccgctaagagaagacatttaaaataagtagtcggcattgtgataaaaagagagcgcgattactgatgtgcaggttctcgattgttgatgaagtcgactagtcggagtcgattctgactagttattgattgtatggaacccgccctcgactagttttctagtcgagacgagtagtcgaagtagaccatcctcaactacttttctagttgagatgagtagtcgaagtagtcgtcggcgacttgattatttgcctcaatctgtgtgtgacttgatcgacgagccgtatgcagcagcttgcggtggaaaccgactcagtcttcgattggaacacggagcgcgtcaattctatgtcgacgtagatttgtctgcttggaactccaactcagtgacttgcttcttgttgagtagattgatcttgatgatgaggtccttcaagctcgcctgatgatctcgacgatcacctctacctgacgcgccaactgttggtgcttagacccagcaacctaccgagggggtacccgaggtagtgttttgtggtggggctcgtcgaagatcaggaacttgaaggtgaactcgaacacacgatttagacaagttcgggctgcttatgccgcataataccccatgtcatgtgtgttggttggattgtattgattgatcagatatttggagggggccctgcctcgccttatattgcccattgccggaggcagggctacaggtcggttgttgtacaagagtactagtcggttttgaccagcgagtcctactctaattgctacaagtagtttcctaatccttgactagtccttgtccgccacgtagaccacgacgtcttgcacctagtctctgtgtttgatacatcttggtgtacagtccgatattgtaggactatccaagcttcccagtaggcccatagatgtatggccgacaactggataatgtaactctgggtcagtactatccttatctatatagacacaaacaacgtactatagcagaagtttaagctcgtaacccaccaatatttggtggcatagaccacgtattgctgatatagtgctcgtaacccaccaatatttcgtggcatagagatctcttaggcaataaattagcagtacgaaacaatctatgtccacgtgttgctaatacaatgttctaaaccttacagcctactggacagttctctagccatgatacatgtgcatgtccgaacaaatatttatgggtacccgaaaggttaattttttgtagtatttatgagggggaggggggcgttgacgaaaaaaataacttagctaagcgtaattggcttaaaaacatacaatgttgttccagcatcaagcctacgtgatcatttcacaaaaccaactcaaaagataggtgtcatgttccttttagtgcaaaacttaaggacacctaccttgcaaaacttagctttgttacccagaatgaaccgctaagctcgaggagctctgaacttacatgaccaaatatattaaacacaaaagtcatgcatgattttctttaataagtatcgagcaatatggttcgggtgtctttcgtctcatacctctattgtcctccgtgatcaacaagggtggatccgggtggtgcaagggggctcaagcccccctacctctcccaaaggagaaagaagggagaagaaagtgaaggaagaagaaaccccctatattctaatgctacctccgccactgctgatcaacacaacattcttaaaaccatttccttggcatttgcgcatgttacaaggtacaaaagagccagcccatatgccaagttactaaactaaactatgatccaccatggagcgagaacaaacgtcaacaggcatcaaccaatgcagcaatcttgatcgctagtactgtccggcattatatctgaaacaaatccagatcacccatctcatcacagtcacatgcattcatggtcacgggaaccgttagcaaaccaccaactaatcagcattgcaacactcttcctcctataaatgcagcgagcgggggacaccataaaccatcacaggcacttagcgatcaagttaattttgtttctgctttgtgcgcctgtgttccagtaa

SEQ ID NO: 412 - DNA, 612 bp, Setaria italica
  source 1..612: mol_type = genomic DNA
accgcggaggagtagggcaggtggcgctggagattggagggcaaaccgggaagcgcgggatggagggaggcgaagcggacgacgtgggggaggctcgcggacgctgaatcgatcggagggtaaactaggaagtgcaggctggagggaggcgaagctgacggtggggggtggttcgcggacgcggaaccgagtggaggaacccagacctaggaagttttttttcaccttttttggttttttcgagtccagatagtaagtatgttgttgtatacttttctcatccaagcaacccctttcaggatccaaattaaagaacttgagctatgtccccgccatatgatcttctctgtcccttttctttaggaatataaaaacatactcgctaatcatgagattatactttaatcacgacattatacttttctttaggaatataaaaacatagtcgctaatcacgagattatactttaatcctatatatggtccccgccacatgatcttatctgtcccttctctttaggaatataaaaacattggtagccaccagcatcagagctgctctctgtatttaattactatatcgtagccaccagcagagctgctcaatccgca

SEQ ID NO: 413 - DNA, 603 bp, Setaria italica; identical to SEQ ID NO: 34
  source 1..603: mol_type = genomic DNA

SEQ ID NO: 414 - DNA, 1005 bp, Setaria italica; identical to SEQ ID NO: 54
  source 1..1005: mol_type = genomic DNA

SEQ ID NO: 415 - DNA, 2201 bp, Setaria italica
  source 1..2201: mol_type = genomic DNA
actgaccttttggatgcggccttgcttcgtcttcttcacgaatgacttgctctgcagcatggtggaaagcgacggcgtgccgcgaggcggcggcgaggagactggaggagacgtgtaccagccggcggcgaggtggaggcggaggcggcggcggcgaggggtgtcggggtttaattgggtttggtactttggtgggtgcgtgttgggtcggttgcctcagatttggttccgacccgtccgagtcccccgtccggaaggccccaaggctggactcgtgaaacatcatcgagctaggcggcccaataggcaatctaccattttgcaggtttttccatagaacacaaaaacaaatggccacttcaccgtttgatcctaaaaaacatagtcttccgagtttggttcggtcaaaaaaaatcagctatgcaattgaaccggtgcgacctagcaggttttagggtgaactagtagaccatgaaccggttttatgttgaaccaatgattagtttgcatattttgcatataatataatgagaaatgataactattaaattgataaataaaaaacctggttcgatcggtaaaccaatgaacaagttacatgaacagttcctctggtccggcttttggttagcgttttttttttctcatgcgccaaatgtgaattaagagtctttgcacttgtctactcgatggacatcttgtaatagatggaattttgtatgtttgtgttcttttttgttttgtaaggattttatggttgtattaagtagattgtactcatttcaatgagcaaaatgtaggaatggttctatatttacccaacaatgtcactgaggttcctgaattattaatatgcgtgtttgccctaaacttagtaacttactaagtgattcacttaaggttcaaatatgaatgatgtgttgatctgactacttagcatccatgtggcatccctgttatccaacctttttttttacaactcattgttcatatttcccttagcccatatgacaaccaaaggaaaaataaaaaattctattataaatttgcaacccgcatttactccatttcaataagcatcataaaagacgtgatatagttggcataagataaaagagagtatgcaaatatgatttgtacatggcgtgcaacgcaatgagttatcataaatcaacaaaaacaaaatgaaaatgattggaaaactatttgaagttctatgtgtttcgtgtgatactagctcacttcagatgtttccctctctccaccactgttggccaacattctaccttagcctatatcgctctctcatcatccaatgttaagcgttattcacactaacttggtcacggtgataggccaccataaaaaaccggcctctgttctacaatttttgtgaaccttttgattgtaccttagcgattgagcattgctgcacttacagagggaatggtacaaataaagatgagtaatatgactagtgtttctcgtaatacctcaatgtagccagtcactccaaacttctatggggagttggggaacatttgagatatagacgatgtaagcgtgaaagggaaaagaagaaaaaaaaattccctcgttgaagaaaatgggaattcacgcaaaaagaagaaaacgggaattcgcgcaattgaccccaaagaaaacaaatgcctagtaggtgccaccgaaaaaagatgaatgaccaccaccaatgtgagaaaccaacaacgtagggtgacgaacgatcacacaaacgagtccatcttatagcctgtccgccatgcacaaataccgatcactcgatcaaacatatctgcccgttaatagtggccccaaaagcacggatcacacaggacacacaaaaaggcccgtcgcccccgatcaaaatgacaaaaaagatcagccccgagcttcatgttccctctcgctgtgacccacaggctccgctagcacgcggacaacaactcgaacggcaggaacagtgacgcacagcgccagccgccaggatatttgcagctctcctgccggcaccagcacacaccacacatcggatatcgccccgccgaacgggtggctgcggcgcatgcaatcgccttatcctacgcccggcgcccccgaggccgccccgaggccacaagcacaaagaagtgatcacggcgccacgaccccccggccggccggcagcacataaattgggagca

SEQ ID NO: 416 - DNA, 1902 bp, Setaria italica
  source 1..1902: mol_type = genomic DNA
ccaataggcaatctaccattttgcaggtttttccatagaacacaaaaacaaatggccacttcaccgtttgatcctaaaaaacatagtcttccgagtttggttcggtcaaaaaaaatcagctatgcaattgaaccggtgcgacctagcaggttttagggtgaactagtagaccatgaaccggttttatgttgaaccaatgattagtttgcatattttgcatataatataatgagaaatgataactattaaattgataaataaaaaacctggttcgatcggtaaaccaatgaacaagttacatgaacagttcctctggtccggcttttggttagcgttttttttttctcatgcgccaaatgtgaattaagagtctttgcacttgtctactcgatggacatcttgtaatagatggaattttgtatgtttgtgttcttttttgttttgtaaggattttatggttgtattaagtagattgtactcatttcaatgagcaaaatgtaggaatggttctatatttacccaacaatgtcactgaggttcctgaattattaatatgcgtgtttgccctaaacttagtaacttactaagtgattcacttaaggttcaaatatgaatgatgtgttgatctgactacttagcatccatgtggcatccctgttatccaacctttttttttacaactcattgttcatatttcccttagcccatatgacaaccaaaggaaaaataaaaaattctattataaatttgcaacccgcatttactccatttcaataagcatcataaaagacgtgatatagttggcataagataaaagagagtatgcaaatatgatttgtacatggcgtgcaacgcaatgagttatcataaatcaacaaaaacaaaatgaaaatgattggaaaactatttgaagttctatgtgtttcgtgtgatactagctcacttcagatgtttccctctctccaccactgttggccaacattctaccttagcctatatcgctctctcatcatccaatgttaagcgttattcacactaacttggtcacggtgataggccaccataaaaaaccggcctctgttctacaatttttgtgaaccttttgattgtaccttagcgattgagcattgctgcacttacagagggaatggtacaaataaagatgagtaatatgactagtgtttctcgtaatacctcaatgtagccagtcactccaaacttctatggggagttggggaacatttgagatatagacgatgtaagcgtgaaagggaaaagaagaaaaaaaaattccctcgttgaagaaaatgggaattcacgcaaaaagaagaaaacgggaattcgcgcaattgaccccaaagaaaacaaatgcctagtaggtgccaccgaaaaaagatgaatgaccaccaccaatgtgagaaaccaacaacgtagggtgacgaacgatcacacaaacgagtccatcttatagcctgtccgccatgcacaaataccgatcactcgatcaaacatatctgcccgttaatagtggccccaaaagcacggatcacacaggacacacaaaaaggcccgtcgcccccgatcaaaatgacaaaaaagatcagccccgagcttcatgttccctctcgctgtgacccacaggctccgctagcacgcggacaacaactcgaacggcaggaacagtgacgcacagcgccagccgccaggatatttgcagctctcctgccggcaccagcacacaccacacatcggatatcgccccgccgaacgggtggctgcggcgcatgcaatcgccttatcctacgcccggcgcccccgaggccgccccgaggccacaagcacaaagaagtgatcacggcgccacgaccccccggccggccggcagcacataaattgggagca

SEQ ID NO: 417 - DNA, 2200 bp, Setaria italica
  source 1..2200: mol_type = genomic DNA
actgaccttttggatgcggccttgcttcgtcttcttcacgaatgacttgctctgcagcatggtggaaagcgacggcgtgccgcgaggcggcggcgaggagactggaggagacgtgtaccagccggcggcgaggtggaggcggaggcggcggcggcgaggggtgtcggggtttaattgggtttggtactttggtgggtgcgtgttgggtcggttgcctcagatttggttccgacccgtccgagtcccccgtccggaaggccccaaggctggactcgtgaaacatcatcgagctaggcggcccaataggcaatctaccattttgcaggtttttccatagaacacaaaaacaaatggccacttcaccgtttgatcctaaaaaacatagtcttccgagtttggttcggtcaaaaaaaatcagctatgcaattgaaccggtgcgacctagcaggttttagggtgaactagtagaccatgaaccggttttatgttgaaccaatgattagtttgcatattttgcatataatataatgagaaatgataactattaaattgataaataaaaaacctggttcgatcggtaaaccaatgaacaagttacatgaacagttcctctggtccggcttttggttagcgtttttttttctcatgcgccaaatgtgaattaagagtctttgcacttgtctactcgatggacatcttgtaatagatggaattttgtatgtttgtgttcttttttgttttgtaaggattttatggttgtattaagtagattgtactcatttcaatgagcaaaatgtaggaatggttctatatttacccaacaatgtcactgaggttcctgaattattaatatgcgtgtttgccctaaacttagtaacttactaagtgattcacttaaggttcaaatatgaatgatgtgttgatctgactacttagcatccatgtggcatccctgttatccaacctttttttttacaactcattgttcatatttcccttagcccatatgacaaccaaaggaaaaataaaaaattctattataaatttgcaacccgcatttactccatttcaataagcatcataaaagacgtgatatagttggcataagataaaagagagtatgcaaatatgatttgtacatggcgtgcaacgcaatgagttatcataaatcaacaaaaacaaaatgaaaatgattggaaaactatttgaagttctatgtgtttcgtgtgatactagctcacttcagatgtttccctctctccaccactgttggccaacattctaccttagcctatatcgctctctcatcatccaatgttaagcgttattcacactaacttggtcacggtgataggccaccataaaaaaccggcctctgttctacaatttttgtgaaccttttgattgtaccttagcgattgagcattgctgcacttacagagggaatggtacaaataaagatgagtaatatgactagtgtttctcgtaatacctcaatgtagccagtcactccaaacttctatggggagttggggaacatttgagatatagacgatgtaagcgtgaaagggaaaagaagaaaaaaaaattccctcgttgaagaaaatgggaattcacgcaaaaagaagaaaacgggaattcgcgcaattgaccccaaagaaaacaaatgcctagtaggtgccaccgaaaaaagatgaatgaccaccaccaatgtgagaaaccaacaacgtagggtgacgaacgatcacacaaacgagtccatcttatagcctgtccgccatgcacaaataccgatcactcgatcaaacatatctgcccgttaatagtggccccaaaagcacggatcacacaggacacacaaaaaggcccgtcgcccccgatcaaaatgacaaaaaagatcagccccgagcttcatgttccctctcgctgtgacccacaggctccgctagcacgcggacaacaactcgaacggcaggaacagtgacgcacagcgccagccgccaggatatttgcagctctcctgccggcaccagcacacaccacacatcggatatcgccccgccgaacgggtggctgcggcgcatgcaatcgccttatcctacgcccggcgcccccgaggccgccccgaggccacaagcacaaagaagtgatcacggcgccacgaccccccggccggccggcagcacataaattgggagca

SEQ ID NO: 418 - DNA, 2352 bp, Setaria italica
  source 1..2352: mol_type = genomic DNA
gaattcgcccttactatagggcacgcgtggtcgacggcccgggctggtatcgttgttcgttcgtgtaccgacatgagcatgtgcaagtacactgatccatgttggtgccttgcgcgaatagaagcaagcggcgagctcggaacgtaatgcgacgagcttgcaaggagcagcatcttctaccactgcaagggatgcaagtctggattgttttggatcgacccaaaaactcattaaaacaaactaatcttgatttcaaagaagggagagtggggataaaaatgaactaattaaccagccagcctactactgcatacctactagtgtcaccacttggatgttggaactagcaactgtgctgtgtgttgtggatgcgaccgttgcacagcactagctgacccggtgaaagtaaaaatcctgtggagaatggctccaagcagccagcggaggccgacgcttgtccacgtctctctcaaccggaaaataaggggggaaagatcctgagaactggaggccagtgtgagctgcttcggcttagccgcttactacacgttgccaaaaggccagcgcggatggccacaactccaaatcctcgcccagctccgcctcacgctcccgccatcctgttcacaacacgacggcctcacaatttctttttctttttcttttttgcaggagctctgctatgctatgtaaagaggaaaagcaattcaaaatcttacaaagtcgatattgcataaatattagagctcacactactcaagttagaagctaaactcatgggtttggacgcctcacaaatttgggaggcgactggtgagtaacccacccaccaatcgcgagggcaccctctcatcaaaacaacgttggtgtttcttttttttttttactaaatggcaggagctctaccttattaataagaaaagattaaaagagtttaaagatcacaagcaaacggcacgccgctgcaaccgcccaagagtgcttcggcagacacatgtcgagtgttataaaaagagctatgtgatctaagttagggaacaaaacgttcgtctatattgctctatgcattcctttgttcgttttgccacctgatgggccgttagaagcttgttttcaaaaattctcctgttaccctctttccacatattccacaaaatgtagatggacatttcgttgaaatcttactgctgatttttgtggatatatacttttccaccgcctcccaccaatctctgacgttgtcgaaatttgaggggtgtgcttgctaaggaagcccacaaatatctctcatatagaaacttggttctagaccgcttgagcatatgggcggagtaggaagaggtgttgcccggattccattggcccattgcataatgcgcaagaggttttggtgcggccatcctctaagtgcgaggttgcctgtcgtgagaattttagtttggatgacaatccagacgaacagcttacatttattttcagtgcgggcacgccaaatgagattggctttgtgacatctatgtgacccaaaaaactgagcaccatatgctgattgggtggagtatttgccatcagccgtccacttccaagtattcgtatcctccgcctctaggtatgtcctgcaatctgatccgagtgagacaaactcctcaacttgagttgtagtcgtattttgttatgcaaggatttgatccacgtgctgttccatagctcttgtgccattgtcttgttttttcttctcaccagatcatataaatgtggccctaaattccttggtgcctcgccatcaagccaaactatggtgccaacacctcgccttctttccgttcgacgtccaacaatggtgccaaaaacaacgttggcgtttcacgtccaactggtagtggcagcacggactctgccgaaatagaacaccgaatatccatcaacattgctttcagggtctcgttgcaacacctgaggcctccaagcacctccagcccagcagcactagtcttctgctctctgtaacaaaaaaaaaaaataccagcaccacgccgcgaaaggtcaccccgagaatcaaccgacgaaacgagaggggaggaagaaaggtcacaagtcacaactcacaaacagaaggggtcgggggcatgcacggagaaaaggccacgcatcgatgagcgtaacagtgaaggttgtgggtgacgcggccagccatcggcaaccatacgttgggctatccaaaatctcatccctcaaccaatcccgacctcacgatcccgcgccgcgcccccgcgcaccacaaacgcggccaccccaatccgccaactcgtatatacacgccgcttgttggctagcatcgtcaccttgatcgat

SEQ ID NO: 419 - DNA, 2307 bp, Setaria italica
  source 1..2307: mol_type = genomic DNA
atcgttgttcgttcgtgtaccgacatgagcatgtgcaagtacactgatccatgttggtgccttgcgcgaatagaagcaagcggcgagctcggaacgtaatgcgacgagcttgcaaggagcagcatcttctaccactgcaagggatgcaagtctggattgttttggatcgacccaaaaactcattaaaacaaactaatcttgatttcaaagaagggagagtggggataaaaatgaactaattaaccagccagcctactactgcatacctactagtgtcaccacttggatgttggaactagcaactgtgctgtgtgttgtggatgcgaccgttgcacagcactagctgacccggtgaaagtaaaaatcctgtggagaatggctccaagcagccagcggaggccgacgcttgtccacgtctctctcaaccggaaaataaggggggaaagatcctgagaactggaggccagtgtgagctgcttcggcttagccgcttactacacgttgccaaaaggccagcgcggatggccacaactccaaatcctcgcccagctccgcctcacgctcccgccatcctgttcacaacacgacggcctcacaatttctttttctttttcttttttgcaggagctctgctatgctatgtaaagaggaaaagcaattcaaaatcttacaaagtcgatattgcataaatattagagctcacactactcaagttagaagctaaactcatgggtttggacgcctcacaaatttgggaggcgactggtgagtaacccacccaccaatcgcgagggcaccctctcatcaaaacaacgttggtgtttcttttttttttttactaaatggcaggagctctaccttattaataagaaaagattaaaagagtttaaagatcacaagcaaacggcacgccgctgcaaccgcccaagagtgcttcggcagacacatgtcgagtgttataaaaagagctatgtgatctaagttagggaacaaaacgttcgtctatattgctctatgcattcctttgttcgttttgccacctgatgggccgttagaagcttgttttcaaaaattctcctgttaccctctttccacatattccacaaaatgtagatggacatttcgttgaaatcttactgctgatttttgtggatatatacttttccaccgcctcccaccaatctctgacgttgtcgaaatttgaggggtgtgcttgctaaggaagcccacaaatatctctcatatagaaacttggttctagaccgcttgagcatatgggcggagtaggaagaggtgttgcccggattccattggcccattgcataatgcgcaagaggttttggtgcggccatcctctaagtgcgaggttgcctgtcgtgagaattttagtttggatgacaatccagacgaacagcttacatttattttcagtgcgggcacgccaaatgagattggctttgtgacatctatgtgacccaaaaaactgagcaccatatgctgattgggtggagtatttgccatcagccgtccacttccaagtattcgtatcctccgcctctaggtatgtcctgcaatctgatccgagtgagacaaactcctcaacttgagttgtagtcgtattttgttatgcaaggatttgatccacgtgctgttccatagctcttgtgccattgtcttgttttttcttctcaccagatcatataaatgtggccctaaattccttggtgcctcgccatcaagccaaactatggtgccaacacctcgccttctttccgttcgacgtccaacaatggtgccaaaaacaacgttggcgtttcacgtccaactggtagtggcagcacggactctgccgaaatagaacaccgaatatccatcaacattgctttcagggtctcgttgcaacacctgaggcctccaagcacctccagcccagcagcactagtcttctgctctctgtaacaaaaaaaaaaaaaaataccagcaccacgccgcgaaaggtcaccccgagaatcaaccgacgaaacgagaggggaggaagaaaggtcacaagtcacaactcacaaacagaaggggtcgggggcatgcacggagaaaaggccacgcatcgatgagcgtaacagtgaaggttgtgggtgacgcggccagccatcggcaaccatacgttgggctatccaaaatctcatccctcaaccaatcccgacctcacgatcccgcgccgcgcccccgcgcaccacaaacgcggccaccccaatccgccaactcgtatatacacgccgcttgttggctagcatcgtcaccttgatcgat

SEQ ID NO: 420 - DNA, 1810 bp, Setaria italica
  source 1..1810: mol_type = genomic DNA
gggcaaggatgatggattgcttttgagaatgacttcttaaagcgtcaagcttttctgactgtgtcaggtcagcttcaggttgaaacttatgcttgtgctctcagtagtgtatatacctttggaccaacgttccgggcagagaactcacatacatcaagacatctggcagagttttggatggttgaaccagaaaatgcatttgcaaacttgcaggtgagctgcttcttgatgactaactttattactttgtggttcgccacctatcaaattggatcatggggttttgtgtggacataactaatgttaaacttgtataaattgtgtcacaggatgatatgaactgtgcagaaaaatatgtacaatacctctgccagtggttactcgatcattgtgaagaagacatagatttcattagcaaaaaatacgagagaaacagtagacataatcaaactgcaattgaccgtctgaagcttgtttcctcaacgcattttgaacgtatttcatacacaatggctgtggacattctgaaaaatacagaacaaggttgaatggggaatcgatttagcatctgagcatgaaaggtatgtgcaagttgtcagttgatcttactggtcttcacctgatttaccttctttgattggttaactgtaactacgtattctgtgaaggtatttgactgaggtgatatataagaagccagttattgtttataactatcccaaagaaataaaagcattttatatgaggctcaatgatgatcagaagactgtttctgctatggatgttcttgcgccacaggtatagatcgaattgttgaaatgtctatgatgctgtccattgttcactgaagtgccccacaccattctaccctcaatcagcatggatataagcagccagattcatgtctgctcttagtagaatataactatttctttctgccttttagaatttagatatctctggattcttttttcgccttttcaccaattacaaagaactaaaactgcatataactatattaagataacaatatttacattttctgaaatagctgtatgcttgcaactacatgctggatattttgctttgcctgctttgtatatagtttgaaagtgagctttgtggccgatgatttctacctaaccataaattattttccttggtaggttggtgaattgactggtggaagccagaggagcatctagatgtcctgaaacagaggtaccgacttgctcaatataattttgtttctatcaggatcaatattaggtttcatttgctcgtcggtggaggtagcaagcagttttgtccatcattggttcacgaatatttgctgaacattgtccaatatttgttctacagaattttggatgcgggattgcccatcacccctgatgcgagctagtctgcttcatggcgaggcggtgacctcgacgtgcagggtgccagggtagagtgcccatcacccctgacgcgagctagtctgcttacgcaagcagcgacgtcacaagtgtagtaaaaggcctcgttgacccacgaccaatccaccgcttcctctagcaccttcttccccgagcaccggcaggcagcagcgagatctaggcagcagccatcgctcctcttctcccccctgctcctgtataaatagcagcaggcaggggcaaccaattccatcaactcgtatcatcgttgatatctcttgcagcgttgggtctctgtcacacacacaggaagcacaggaagctaagctagcagtcgcgagagagcgagcgatggcgcggcccaaggtgtacgggtgggcgatctcgcc

SEQ ID NO: 421 - DNA, 1766 bp, Setaria italica
  source 1..1766: mol_type = genomic DNA
ggatgatggattgcttttgagaatgacttcttaaagcgtcaagcttttctgactgtgtcaggtcagcttcaggttgaaacttatgcttgtgctctcagtagtgtatatacctttggaccaacgttccgggcagagaactcacatacatcaagacatctggcagagttttggatggttgaaccagaaaatgcatttgcaaacttgcaggtgagctgcttcttgatgactaactttattactttgtggttcgccacctatcaaattggatcatggggttttgtgtggacataactaatgttaaacttgtataaattgtgtcacaggatgatatgaactgtgcagaaaaatatgtacaatacctctgccagtggttactcgatcattgtgaagaagacatagatttcattagcaaaaaatacgagagaaacagtagacataatcaaactgcaattgaccgtctgaagcttgtttcctcaacgcattttgaacgtatttcatacacaatggctgtggacattctgaaaaatacagaacaaggttgaatggggaatcgatttagcatctgagcatgaaaggtatgtgcaagttgtcagttgatcttactggtcttcacctgatttaccttctttgattggttaactgtaactacgtattctgtgaaggtatttgactgaggtgatatataagaagccagttattgtttataactatcccaaagaaataaaagcattttatatgaggctcaatgatgatcagaagactgtttctgctatggatgttcttgcgccacaggtatagatcgaattgttgaaatgtctatgatgctgtccattgttcactgaagtgccccacaccattctaccctcaatcagcatggatataagcagccagattcatgtctgctcttagtagaatataactatttctttctgccttttagaatttagatatctctggattcttttttcgccttttcaccaattacaaagaactaaaactgcatataactatattaagataacaatatttacattttctgaaatagctgtatgcttgcaactacatgctggatattttgctttgcctgctttgtatatagtttgaaagtgagctttgtggccgatgatttctacctaaccataaattattttccttggtaggttggtgaattgactggtggaagccagaggagcatctagatgtcctgaaacagaggtaccgacttgctcaatataattttgtttctatcaggatcaatattaggtttcatttgctcgtcggtggaggtagcaagcagttttgtccatcattggttcacgaatatttgctgaacattgtccaatatttgttctacagaattttggatgcgggattgcccatcacccctgatgcgagctagtctgcttcatggcgaggcggtgacctcgacgtgcagggtgccagggtagagtgcccatcacccctgacgcgagctagtctgcttacgcaagcagcgacgtcacaagtgtagtaaaaggcctcgttgacccacgaccaatccaccgcttcctctagcaccttcttccccgagcaccggcaggcagcagcgagatctaggcagcagccatcgctcctcttctcccccctgctcctgtataaatagcagcaggcaggggcaaccaattccatcaactcgtatcatcgttgatatctcttgcagcgttgggtctctgtcacacacacaggaagcacaggaagctaagctagcagtcgcgagagagcgagcg

SEQ ID NO: 422 - DNA, 518 bp, Setaria italica
  source 1..518: mol_type = genomic DNA
caggatcaatattaggtttcatttgctcgtcggtggaggtagcaagcagttttgtccatcattggttcacgaatatttgctgaacattgtccaatatttgttctacagaattttggatgcgggattgcccatcacccctgatgcgagctagtctgcttcatggcgaggcggtgacctcgacgtgcagggtgccagggtagagtgcccatcacccctgacgcgagctagtctgcttacgcaagcagcgacgtcacaagtgtagtaaaaggcctcgttgacccacgaccaatccaccgcttcctctagcaccttcttccccgagcaccggcaggcagcagcgagatctaggcagcagccatcgctcctcttctcccccctgctcctgtataaatagcagcaggcaggggcaaccaattccatcaactcgtatcatcgttgatatctcttgcagcgttgggtctctgtcacacacacaggaagcacaggaagctaagctagcagtcgcgagagagcgagcg

SEQ ID NO: 423 - DNA, 513 bp, Setaria italica
  source 1..513: mol_type = genomic DNA
caggatttaggtttcatttgctcgtcggtggaggtagcaagcagttttgtccatcattggttcacgaatatttgctgaacattgtccaatatttgttctacagaattttggatgcgggattgcccatcacccctgatgcgagctagtctgcttcatggcgaggcggtgacctcgacgtgcagggtgccagggtagagtgcccatcacccctgacgcgagctagtctgcttacgcaagcagcgacgtcacaagtgtagtaaaaggcctcgttgacccacgaccaatccaccgcttcctctagcaccttcttccccgagcaccggcaggcagcagcgagatctaggcagcagccatcgctcctcttctcccccctgctcctgtataaatagcagcaggcaggggcaaccaattccatcaactcgtatcatcgttgatatctcttgcagcgttgggtctctgtcacacacacaggaagcacaggaagctaagctagcagtcgcgagagagcgagcg

SEQ ID NO: 424 - DNA, 1002 bp, Setaria italica
  source 1..1002: mol_type = genomic DNA
ctttgcttcacagctagtatcgtataagcgcttgatcactaataataacaactccgatcccggcgtttaattacggcaatcgatgttgatggatcttttggttgtcgtgctgctagctgttcacgtttcagagatcagtttagtcaaatgcaatgcataggtaaggcatccacagtcatttgctgaaggtctaatctgcatactcatttggtaagcatgcacttagcaattaagtatttattatgaaatggtctatccataaaatttctaccatttttcaagttccaataaaggagcataatccaacaatgttacaatgtcatatataatatttgctcggctgctacttgaaatggcatgtgtaataggtgtttgagcttgtaagctaactgctgccccttccgttgcaaaacatatacatatatatagttctcaaatataattgtcctatatgcacacataagagaaccaatttaataagtgaaatttgagcaataattatggaattgtgctatggagctcattattagacacaaaagttcaacattcaagtaattcacaccagtaaattaaaagcagtgaaaacgtattgagaaccttaatatttcgatggatggttcttccttcattactttttaaaatgatgaatataaaactaatacattgataaaactgcttaaatcagagaaatcaagtaggtcagtttcaagggggccttctagacacctatgatcatattacctttgatgccctagattctccaatgatccatgaagatgccttcaaagcagctaaaattaatcaaagcaccagataggataggaaaacaagtacagagacaatttgttattacatcgcttcttgcatatagtgtagccaagtcaaggtgctccactgatccattggcttttaaaaatctccacttgatcttctactgaaccactagctactgcatggcctcatcaaggtactataaatagacatgctgctttcactcaaact

SEQ ID NO: 425 - DNA, 316 bp, Setaria italica
  source 1..316: mol_type = genomic DNA
aacacaaagagccagtcatcctggtcaggtcgttttaggatcagaaataaagtgcgggaaggaaaaagaaaaagaaaactctagccctactcccattttgtggtaggcaagctacaattttgttcccttgttcagaacaggggtgtgcattcaattccttgcttcctcccattcccccatcccatctcctctcccctgctccgccgaagcagcaagccagcctggttcccccaacacccacagccatcacctcctccccccaatccggcaatcccccactatgaatctgatcccccaagaagcccccgcttccaat

SEQ ID NO: 426 - DNA, 1279 bp, Setaria italica
  source 1..1279: mol_type = genomic DNA
ccaccgatcatcacacacagccagtagtgggggtgggccaagcaatcaggcacccggcaatgcgagctgatgcgtgatgatggtgctaccaacaaactgactataaaatttctgatttgaaagggattggcctcgatattttattagctccccggcttttgtcacgacacgttagcatgcgtgccttctagaagctagtccgggtattaccgctagaaagttcccgaaatgaagcatttaccacccgtaaagctcatttttctttatgatgagtagacacggtaccaacattgaggaccgattggttggctcccaaaatctgccctgccaaactagggcaagttcataaattttgacattcgcttggttggcaatcaattaaatcctattctaaaattcttgcctaggttttgatataacatgccctatattttggtctactcaaattttggtatggtaaattttgaacaccaacaaatcaggctattatttatcttatctctttctcaatttcattacacagcaaggcagtaattaaaaggaccgtatatacaatggatgtaagaataaaatgtataagtagaaatatattggcatgcctcgtgctggtgcatgtcgatatgctctcaattagaagttggagacaggttatgcttaggatagtcccaacctatgatatctgtgtgtctatactgccacataagtaagacatcactttagaaattacattctacaacctataatttcttagtgtggatccttaattaattcatcatctctcctctcaattcctcatcaattatgaagacaccatcttcttccaatgcaaatttaacactgtctaggatctaggttcaggtgttgatactgggtcttgcatgagatccagtttcttgttcttccaattctctctcatttaatatataatcacataagcaaaagatcctatgtagctgcacaattaatgctatggaaactatcctaatcggagggttgggactgctcctgcctatggcggcttattccccatttgcctaacctgaaaatcgaaagggagtgcatgacagggcaaacactagtgttgcctgcatcaataatcgtccatgattatatagaggtagcatgacttttttaggcgtcgtgtcctaatcaatcagaaaagaaagccaacctaatcgctatgggccgcaaccaccgatgcgactatgcgagtatatggaacccgttgctactcccccactatatatcgtggagtctgatggcaatccaacggcagacg

SEQ ID NO: 427 - DNA, 1470 bp, Setaria italica
  source 1..1470: mol_type = genomic DNA
gaagagtcggcgatgccgctgaacatgatcttggcgatcgggcacgcggcgtacgtgaagggggaggaggaggccggcttcgggatcgacccggccaagggggtggacgcaagcgagctgtacccggacgttaagtacaccaccgtcgacgagtacctcaacaggttcctctgaaggacgagacgagaacaatatgcaccttgtaattttcatcatttttggtaatttaaattgtcaaggattggtgatctaagtcgacaagggatgatgtgtcaatataagatcacgatcaatagtaagatgcgtcaagaaccggaatagcacgcgagcgatttatacaggttcagaccccattatttgagtataagagttttttctattaccgtgagcacaaacaatttggtatttaggtcaagatgcaacccaaaagcccaaatgcttatgtgtcttgtacatcgccccatgatgcgtacatataccgatcgagaaccacttttgttgtcgtagtcggttatgaactcctactcgtatacaagtagatcaattcgtcgggatgatgtgtatgctaataagactcgacagtacgaacttgatcttgaattgagcaatctaaaaccttcctttgacgcttatttcattatcatcactcatcattagcccccaagctctatccagaattccaaattaggctgagcggatctggccaaattttgcttttgccgaccatggactcggccacagttgacgggaagttaccttagttgaagtcgcctgactactaaacattatcaaattttgccatttttgttgatgaactctactcaatgttgtctttgttagtggaatatataatttcccagtgcagaggagagaaagaaatgaaaaaaatgaccactgctttaggcataaaattggtccaactctaaccacatccaagttcaagaaaaaaataaaaagagcatccactccccgtccgtgtccacaagcccacaatggtaatttaaaatttctcttcatgcaccgatttctcttttttatttcttcttacataaatttttgttcatccccagatttccaaccgtgttgtaaaaatatcccgatatcgctaacacaacggaggcggaggagacagaaaatctcgctagaattggtgatagggcgaagagaaaaattttgaagtgggtggaagagagcaagatactcgggcacaatatagcaattccgaaaaagtaggccaaacacaaatgtcgtcatccttgaacaatgacgacaccaaggtttcggcccataatgtccaagtccggaaacacaaccaggttcacgcttcaccacaaccatcagtcgacgaaacaaaatatcgatggaaccagctgtgaatgtgatactcgattagaccattatatacgctggcgctggatgccaatcagacgccaagcgagtttctgaggttctgtcgtgtagtaacacagg

SEQ ID NO: 428 - DNA, 620 bp, Setaria italica
  source 1..620: mol_type = genomic DNA
aaaatttctcttcatgcaccgatttctcttttttatttcttcttacataaatttttgttcatccccagatttccaaccgtgttgtaaaaatatcccgatatcgctaacacaacggaggcggaggagacagaaaatctcgctagaattggtgatagggcgaagagaaaaattttgaagtgggtggaagagagcaagatactcgggcacaatatagcaattccgaaaaagtaggccaaacacaaatgtcgtcatccttgaacaatgacgacaccaaggtttcggcccataatgtccaagtccggaaacacaaccaggttcacgcttcaccacaaccatcagtcgacgaaacaaaatatcgatggaaccagctgtgaatgtgatactcgattagaccattatatacgctggcgctggatgccaatcagacgccaagcgagtttctgaggttctgtcgtgtagtaacacaggatggcgtcggagaagagcaagatcctggtggtcggcgccaccgggtacctgggcaggcacgtcgtggcggcgagcgcgcggctgggccacccgaccttcgcgctcgtcagggacacggcgccgtccaatccggccaaggcggcgctgatcaa

SEQ ID NO: 429 - DNA, 1272 bp, Setaria italica
  source 1..1272: mol_type = genomic DNA
ccttgtaattttcatcatttttggtaatttaaattgtcaaggattggtgatctaagtcgacaagggatgatgtgtcaatataagatcacgatcaatagtaagatgcgtcaagaaccggaatagcacgcgagcgatttatacaggttcagaccccattatttgagtataagagttttttctattaccgtgagcacaaacaatttggtatttaggtcaagatgcaacccaaaagcccaaatgcttatgtgtcttgtacatcgccccatgatgcgtacatataccgatcgagaaccacttttgttgtcgtagtcggttatgaactcctactcgtatacaagtagatcaattcgtcgggatgatgtgtatgctaataagactcgacagtacgaacttgatcttgaattgagcaatctaaaaccttcctttgacgcttatttcattatcatcactcatcattagcccccaagctctatccagaattccaaattaggctgagcggatctggccaaattttgcttttgccgaccatggactcggccacagttgacgggaagttaccttagttgaagtcgcctgactactaaacattatcaaattttgccatttttgttgatgaactctactcaatgttgtctttgttagtggaatatataatttcccagtgcagaggagagaaagaaatgaaaaaaatgaccactgctttaggcataaaattggtccaactctaaccacatccaagttcaagaaaaaaataaaaagagcatccactccccgtccgtgtccacaagcccacaatggtaatttaaaatttctcttcatgcaccgatttctcttttttatttcttcttacataaatttttgttcatccccagatttccaaccgtgttgtaaaaatatcccgatatcgctaacacaacggaggcggaggagacagaaaatctcgctagaattggtgatagggcgaagagaaaaattttgaagtgggtggaagagagcaagatactcgggcacaatatagcaattccgaaaaagtaggccaaacacaaatgtcgtcatccttgaacaatgacgacaccaaggtttcggcccataatgtccaagtccggaaacacaaccaggttcacgcttcaccacaaccatcagtcgacgaaacaaaatatcgatggaaccagctgtgaatgtgatactcgattagaccattatatacgctggcgctggatgccaatcagacgccaagcgagtttctgaggttctgtcgtgtagtaacacagg

SEQ ID NO: 430 - DNA, 1236 bp, Setaria italica
  source 1..1236: mol_type = genomic DNA
ccttgtaattttcatcatttttggtaatttaaattgtcaaggattggtgatctaagtcgacaagggatgatgtgtcaatataagatcacgatcaatagtaagatgcgtcaagaaccggaatagcacgcgagcgatttatacaggttcagaccccattatttgagtataagagttttttctattaccgtgagcacaaacaatttggtatttaggtcaagatgcaacccaaaagcccaaatgcttatgtgtcttgtacatcgccccatgatgcgtacatataccgatcgagaaccacttttgttgtcgtagtcggttatgaactcctactcgtatacaagtagatcaattcgtcgggatgatgtgtatgctaataagactcgacagtacgaacttgatcttgaattgagcaatctaaaaccttcctttgacgcttatttcattatcatcactcatcattagcccccaagctctatccagaattccaaattaggctgagcggatctggccaaattttgcttttgccgaccatggactcggccacagttgacgggaagttaccttagttgaagtcgcctgactactaaacattatcaaattttgccatttttgttgatgaactctactcaatgttgtctttgttagtggaatatataatttcccagtgcagaggagagaaagaaatgaaaaaaatgaccactgctttaggcataaaattggtccaactctaaccacatccaagttcaagaaaaaaataaaaagagcatccactccccgtccgtgtccacaagcccacaatggtaatttaaaatttctcttcatgcaccgatttctcttttttatttcttcttacataaatttttgttcatccccagatttccaaccgtgttgtaaaaatatcccgatatcgctaacacaacggaggcggaggagacagaaaatctcgctagaattggtgatagggcgaagagaaaaattttgaagtgggtggaagagagcaagatactcgggcacaatatagcaattccgaaaaagtaggccaaacacaaatgtcgtcatccttgaacaatgacgacaccaaggtttcggcccataatgtccaagtccggaaacacaaccaggttcacgcttcaccacaaccatcagtcgacgaaacaaaatatcgatggaaccagctgtgaatgtgatactcgattagaccattatatacgctggcgctggatgccaatcagacgccaa

SEQ ID NO: 431 - DNA, 1090 bp, Setaria italica
  source 1..1090: mol_type = genomic DNA
ctgaagagtcggcgatgccgctgaacatgatcttggcgatcgggcacgcggcgtacgtgaagggggaggaggaggccggcttcgggatcgacccggccaagggggtggacgcaagcgagctgtacccggacgttaagtacaccaccgtcgacgagtacctcaacaggttcctctgaaggacgagacgagaacaatatgcaccttgtaattttcatcatttttggtaatttaaattgtcaaggattggtgatctaagtcgacaagggatgatgtgtcaatataagatcacgatcaatagtaagatgcgtcaagaaccggaatagcacgcgagcgatttatacaggttcagaccccattatttgagtataagagttttttctattaccgtgagcacaaacaatttggtatttaggtcaagatgcaacccaaaagcccaaatgcttatgtgtcttgtacatcgccccatgatgcgtacatataccgatcgagaaccacttttgttgtcgtagtcggttatgaactcctactcgtatacaagtagatcaattcgtcgggatgatgtgtatgctaataagactcgacagtacgaacttgatcttgaattgagcaatctaaaaccttcctttgacgcttatttcattatcatcactcatcattagcccccaagctctatccagaattccaaattaggctgagcggatctggccaaattttgcttttgccgaccatggactcggccacagttgacgggaagttaccttagttgaagtcgcctgactactaaacattatcaaattttgccatttttgttgatgaactctactcaatgttgtctttgttagtggaatatataatttcccagtgcagaggagagaaagaaatgaaaaaaatgaccactgctttaggcataaaattggtccaactctaaccacatccaagttcaagaaaaaaataaaaagagcatccactccccgtccgtgtccacaagcccacaatggtaatttaaaatttctcttcatgcaccgatttctcttttttatttcttcttacataaatttttgttcatccccagatttccaaccgtgttgta

SEQ ID NO: 432 - DNA, 1412 bp, Setaria italica
  source 1..1412: mol_type = genomic DNA
aaatttgggtgtgaataaggtttgtctatacctcgagtggtgggtccactgacaacagcacgagaacaaggtatccaccgatcatcacacacagccagtagtgggggtgggccaagcaatcaggcacccggcaatgcgagctgatgcgtgatgatggtgctaccaacaaactgactataaaatttctgatttgaaagggattggcctcgatattttattagctccccggcttttgtcacgacacgttagcatgcgtgccttctagaagctagtccgggtattaccgctagaaagttcccgaaatgaagcatttaccacccgtaaagctcatttttctttatgatgagtagacacggtaccaacattgaggaccgattggttggctcccaaaatctgccctgccaaactagggcaagttcataaattttgacattcgcttggttggcaatcaattaaatcctattctaaaattcttgcctaggttttgatataacatgccctatattttggtctactcaaattttggtatggtaaattttgaacaccaacaaatcaggctattatttatcttatctctttctcaatttcattacacagcaaggcagtaattaaaaggaccgtatatacaatggatgtaagaataaaatgtataagtagaaatatattggcatgcctcgtgctggtgcatgtcgatatgctctcaattagaagttggagacaggttatgcttaggatagtcccaacctatgatatctgtgtgtctatactgccacataagtaagacatcactttagaaattacattctacaacctataatttcttagtgtggatccttaattaattcatcatctctcctctcaattcctcatcaattatgaagacaccatcttcttccaatgcaaatttaacactgtctaggatctaggttcaggtgttgatactgggtcttgcatgagatccagtttcttgttcttccaattctctctcatttaatatataatcacataagcaaaagatcctatgtagctgcacaattaatgctatggaaactatcctaatcggagggttgggactgctcctgcctatggcggcttattccccatttgcctaacctgaaaatcgaaagggagtgcatgacagggcaaacactagtgttgcctgcatcaataatcgtccatgattatatagaggtagcatgacttttttaggcgtcgtgtcctaatcaatcagaaaagaaagccaacctaatcgctatgggccgcaaccaccgatgcgactatgcgagtatatggaacccgttgctactcccccactatatatcgtggagtctgatggcaatccaacggcagacgagatttgcagcgcacactgagcgagtacttggcaggccgatcagctcgttgatagcaag

SEQ ID NO: 433 - DNA, 1365 bp, Setaria italica
  source 1..1365: mol_type = genomic DNA
ccaccgatcatcacacacagccagtagtgggggtgggccaagcaatcaggcacccggcaatgcgagctgatgcgtgatgatggtgctaccaacaaactgactataaaatttctgatttgaaagggattggcctcgatattttattagctccccggcttttgtcacgacacgttagcatgcgtgccttctagaagctagtccgggtattaccgctagaaagttcccgaaatgaagcatttaccacccgtaaagctcatttttctttatgatgagtagacacggtaccaacattgaggaccgattggttggctcccaaaatctgccctgccaaactagggcaagttcataaattttgacattcgcttggttggcaatcaattaaatcctattctaaaattcttgcctaggttttgatataacatgccctatattttggtctactcaaattttggtatggtaaattttgaacaccaacaaatcaggctattatttatcttatctctttctcaatttcattacacagcaaggcagtaattaaaaggaccgtatatacaatggatgtaagaataaaatgtataagtagaaatatattggcatgcctcgtgctggtgcatgtcgatatgctctcaattagaagttggagacaggttatgcttaggatagtcccaacctatgatatctgtgtgtctatactgccacataagtaagacatcactttagaaattacattctacaacctataatttcttagtgtggatccttaattaattcatcatctctcctctcaattcctcatcaattatgaagacaccatcttcttccaatgcaaatttaacactgtctaggatctaggttcaggtgttgatactgggtcttgcatgagatccagtttcttgttcttccaattctctctcatttaatatataatcacataagcaaaagatcctatgtagctgcacaattaatgctatggaaactatcctaatcggagggttgggactgctcctgcctatggcggcttattccccatttgcctaacctgaaaatcgaaagggagtgcatgacagggcaaacactagtgttgcctgcatcaataatcgtccatgattatatagaggtagcatgacttttttaggcgtcgtgtcctaatcaatcagaaaagaaagccaacctaatcgctatgggccgcaaccaccgatgcgactatgcgagtatatggaacccgttgctactcccccactatatatcgtggagtctgatggcaatccaacggcagacgagatttgcagcgcacactgagcgagtacttggcaggccgatcagctcgttgatagcaagctcactcgtcagtaagtagcaatcagg

SEQ ID NO: 434 - DNA, 361 bp, Setaria italica
  source 1..361: mol_type = genomic DNA
cctgcctatggcggcttattccccatttgcctaacctgaaaatcgaaagggagtgcatgacagggcaaacactagtgttgcctgcatcaataatcgtccatgattatatagaggtagcatgacttttttaggcgtcgtgtcctaatcaatcagaaaagaaagccaacctaatcgctatgggccgcaaccaccgatgcgactatgcgagtatatggaacccgttgctactcccccactatatatcgtggagtctgatggcaatccaacggcagacgagatttgcagcgcacactgagcgagtacttggcaggccgatcagctcgttgatagcaagctcactcgtcagtaagtagcaatcagg

SEQ ID NO: 435 - DNA, 1293 bp, Setaria italica
  source 1..1293: mol_type = genomic DNA
ccaccgatcatcacacacagccagtagtgggggtgggccaagcaatcaggcacccggcaatgcgagctgatgcgtgatgatggtgctaccaacaaactgactataaaatttctgatttgaaagggattggcctcgatattttattagctccccggcttttgtcacgacacgttagcatgcgtgccttctagaagctagtccgggtattaccgctagaaagttcccgaaatgaagcatttaccacccgtaaagctcatttttctttatgatgagtagacacggtaccaacattgaggaccgattggttggctcccaaaatctgccctgccaaactagggcaagttcataaattttgacattcgcttggttggcaatcaattaaatcctattctaaaattcttgcctaggttttgatataacatgccctatattttggtctactcaaattttggtatggtaaattttgaacaccaacaaatcaggctattatttatcttatctctttctcaatttcattacacagcaaggcagtaattaaaaggaccgtatatacaatggatgtaagaataaaatgtataagtagaaatatattggcatgcctcgtgctggtgcatgtcgatatgctctcaattagaagttggagacaggttatgcttaggatagtcccaacctatgatatctgtgtgtctatactgccacataagtaagacatcactttagaaattacattctacaacctataatttcttagtgtggatccttaattaattcatcatctctcctctcaattcctcatcaattatgaagacaccatcttcttccaatgcaaatttaacactgtctaggatctaggttcaggtgttgatactgggtcttgcatgagatccagtttcttgttcttccaattctctctcatttaatatataatcacataagcaaaagatcctatgtagctgcacaattaatgctatggaaactatcctaatcggagggttgggactgctcctgcctatggcggcttattccccatttgcctaacctgaaaatcgaaagggagtgcatgacagggcaaacactagtgttgcctgcatcaataatcgtccatgattatatagaggtagcatgacttttttaggcgtcgtgtcctaatcaatcagaaaagaaagccaacctaatcgctatgggccgcaaccaccgatgcgactatgcgagtatatggaacccgttgctactcccccactatatatcgtggagtctgatggcaatccaacggcagacgagatttgcagcgca

SEQ ID NO: 436 - DNA, 289 bp, Setaria italica
  source 1..289: mol_type = genomic DNA
cctgcctatggcggcttattccccatttgcctaacctgaaaatcgaaagggagtgcatgacagggcaaacactagtgttgcctgcatcaataatcgtccatgattatatagaggtagcatgacttttttaggcgtcgtgtcctaatcaatcagaaaagaaagccaacctaatcgctatgggccgcaaccaccgatgcgactatgcgagtatatggaacccgttgctactcccccactatatatcgtggagtctgatggcaatccaacggcagacgagatttgcagcgca

SEQ ID NO: 437 - DNA, 669 bp, Setaria italica
  source 1..669: mol_type = genomic DNA
tagcctccgaatattcgatgtggcatgaattttagtccggactaaagatccaaacaccccttaatttcttgggttttggatattcctcaacttgaaccatcatagattacatagtccaagcttcttcctcaaatttttgtttttgtccataattttaagctagcgaactcattaaccaactacccctagcttacgaaagttgggatgacacaaaaacatggtggaaatccttaggaatgaataaaggacattttttggtccgtgcaaaagtgtgacttgtacttgaaggaaaattattggacctaaaaatagtttaaaaaaatgtgacactagctcgagagaagcaagcgaccaatagggattgtccaaccagatagggtgatactatagagtctatagagacgaagcgaaagcagatataggctggtggaatggaaagggatgttaatcctgccgagggtgtaactaatggaaaatttcttgtatttttcgtaatccatgctttggattacacagcaggccaaaacgagtgacaacacgtcactaatagttgttgatggttgcccatttaagtaaaaaaggttacagatcaccaaaccaaatatcaccgcaaaataattggccctataaataggctgcccggcctgcataacaatcgtgccttgctgt

SEQ ID NO: 438 - DNA, 1760 bp, Setaria italica
  source 1..1760: mol_type = genomic DNA
ccgctgctcaaaacaagtcaacgttgtggaggttctacaagattgagaggagtactaggcatacgttttctccggtcaactgcctgtggagtcaccgtgcttgttgaagatccgcagcgataataataaaattttgtgctattgggtttaaaagactatcggtcaggatatactctctttacgttatgacattgactatgatattcactaaagttgtcgcatgtgtgtaatttgatcctaacgcacatgtaatttatgcatggtggttttacctttaaaactggggtgtaacattttaacactattttaatatatttaacacagtaggggcctcctctactgtatttaccttaaaaaaaagataacaaaaaacgcatgcattgagtaagcagaaatgctaaaatggcgtgaagaagaggtatagtctcacaaatctttgtccaaatggactaatggtctaaaaaaaagtgaaaatgaaccttagatttcctggagaattaacaaaaaagaaactttgatgccaataacgattttcctccgggagagactatgcagggcacttgctgctccgtttctttcaacaatgaattccgttgggaaccgtttcatgcaagttgcgcatttctttgaggttgtggctgacatagagtttagggtactaaataatcattggtttggccaatagattaaaaataataattcaactgtgctagaaactagagttaatacctttttcattgcttgcatgagaaaccctatccaattttgtacagtactgacgtccgcgttaggatggaactggtgtaagattgacttttattaatcggaactctatacaattcactgttttttgtgcaagaatttgaatacaactggtacaagcaatgtatgcaatcttaagctgtgcgatgatgtatccagtttaagcaatgagttggcatcacgatctgaaagaaagattcaaacagataaggttttcatcaaattcagtgcatattgtgcaagaaatttgaatccaactctttcaaggaacttaatcaattcaaagatgtgcaatagggaaccacttcacacaatgaactggcatcacagcctgaaagaaaggtttgaacagataaggatttgataaaattcaatgcatgttgtacaaaaagaatctgaattcaattcttgcaagaaacgtattcaacttaaatatgtgcaatgatgcatgtatttaagcaaggtatcacatcacagtctgcaagcaagaatttaaaaagctaaggatttcaccaaactttatgcaaactgtgcaggaagtcatattcgattcgttcaagaaacatcacaatcagaaaagcaagatttgaaccggccagcagggaacttatccgctgcgtaccatttatacaactttattcagattcaaatgaaaaaattgcaacttttgtaagtatataagcatctctgctataaaaaatatgttaagttactgttaataaagtcaaattgaccgggcaaacaattggatttcttttaattcatgcaagcttttccagtagcaacataacctttatcttgctcttgagaaagaaaaaacacatgtaaaaactggcaacgttggagtactggtattttcctgcactatttcagccaagtggccaaccaatagcgtcacggcatgtaaatgcctcagacgccatgcagttgtttgattgcctctcaaccactataaattgggggcacatatgccctctcctcggcaattgctctgtgct

SEQ ID NO: 439 - DNA, 936 bp, Setaria italica
  source 1..936: mol_type = genomic DNA
cggaactctatacaattcactgttttttgtgcaagaatttgaatacaactggtacaagcaatgtatgcaatcttaagctgtgcgatgatgtatccagtttaagcaatgagttggcatcacgatctgaaagaaagattcaaacagataaggttttcatcaaattcagtgcatattgtgcaagaaatttgaatccaactctttcaaggaacttaatcaattcaaagatgtgcaatagggaaccacttcacacaatgaactggcatcacagcctgaaagaaaggtttgaacagataaggatttgataaaattcaatgcatgttgtacaaaaagaatctgaattcaattcttgcaagaaacgtattcaacttaaatatgtgcaatgatgcatgtatttaagcaaggtatcacatcacagtctgcaagcaagaatttaaaaagctaaggatttcaccaaactttatgcaaactgtgcaggaagtcatattcgattcgttcaagaaacatcacaatcagaaaagcaagatttgaaccggccagcagggaacttatccgctgcgtaccatttatacaactttattcagattcaaatgaaaaaattgcaacttttgtaagtatataagcatctctgctataaaaaatatgttaagttactgttaataaagtcaaattgaccgggcaaacaattggatttcttttaattcatgcaagcttttccagtagcaacataacctttatcttgctcttgagaaagaaaaaacacatgtaaaaactggcaacgttggagtactggtattttcctgcactatttcagccaagtggccaaccaatagcgtcacggcatgtaaatgcctcagacgccatgcagttgtttgattgcctctcaaccactataaattgggggcacatatgccctctcctcggcaattgctctgtgct

SEQ ID NO: 440 - DNA, 483 bp, Setaria italica
  source 1..483: mol_type = genomic DNA
taaggaaataataaaagaagaaactacttgtttttgcaatgataacgtacatacagatatttctaaagccatcaagtacctagcttgtctaaataacaagtgtgtcctggaacaagtatcgagtacctgaaagcaacctgctttgaattggaaaggataaaaattcgacaaggaacgaacaaaggaggcacatttcttgccggccagaaactattgggtctttgcatccttgtgaattgataaacgtgctggtgtgtttcaatgatgtccatgagatgggaatacaaagtcaagcacgccttattaccttattgtgtggctctgtctgcagaaagcaaccgggcgcattttcttccgataccgtggttactttcaaattggaagacagagacgtacacacaaggcaataattcagggaacaattccatccatccactgctataaaaggcggtgttggggtgttgggtctcttcagttcagtgt

SEQ ID NO: 441 - DNA, 1516 bp, Setaria italica
  source 1..1516: mol_type = genomic DNA
cctcttcctttatttttgccatcagcgtcgttgttgaactctcgtgcctgttaaagatgtgtgtgttccgctctttccaaatttcccatataatgagtagagtgagactttgcatagccttgcgcggtaagtccagtattgtagttatagaagtccatcattccaatgcattggatgagggttgccatgcagttggtctgatgcttggctgcgctaaccatgttgccgttaaatcccatatcctccttgtgttcctgcacttagcctagatgtggtgactagtttccatggtttgtctgcatagggtgcaagtggcgttgtatggccatccacgtttagcctgcctatccacggaccaaactcagttttgtgtaattagccgcaagaagaatttgcattttgccggcgcccacgttttccagacagaagagatttctggtgtttcgatgcagcccaggaactgtgctttatatgccgatgctattgtatacatgacggatcttgttagtttctagaagatagtatcctcttccacttatcgaagctcctgaccatagcccatagggcgaacgatgctagatgctaaatgtgaagtggtgatgctgttgtcgatattgaggtcacagatccagttgttactgatagcatcgtgaactgtcctattttgtcttcttgaaatgtcgaagaggagtggagcaatgtccttaggtgctggccatgtagctagccagaagtccagaagctagcctttttgccatcaccaagagtgataaccatgcaggcaacaaatacttgcatgtctgtctcgtcgcatgggatttctatgttggtccagggtttttccggtgatgcctactcatgccaaagccacctcagacggagggctcgtgcgaatttctcgaggtcagcccctcgtattgcttcagtaggcaggttttcgtccagttgactttacatttaccctcggttagctgttggtctcccgctcagaggaattttttacggatcttgtctaagtcttggagcccctctttaaggaaataataaaagaagaaactacttgtttttgcaatgataacgtacatacagatatttctaaagccatcaagtacctagcttgtctaaataacaagtgtgtcctggaacaagtatcgagtacctgaaagcaacctgctttgaattggaaaggataaaaattcgacaaggaacgaacaaaggaggcacatttcttgccggccagaaactattgggtctttgcatccttgtgaattgataaacgtgctggtgtgtttcaatgatgtccatgagatgggaatacaaagtcaagcacgccttattaccttattgtgtggctctgtctgcagaaagcaaccgggcgcattttcttccgataccgtggttactttcaaattggaagacagagacgtacacacaaggcaataattcagggaacaattccatccatccactgctataaaaggcggtgttggggtgttgggtctcttcagttcagtgt

SEQ ID NO: 442 - DNA, 170 bp, Setaria italica
  source 1..170: mol_type = genomic DNA
gtgtggctctgtctgcagaaagcaaccgggcgcattttcttccgataccgtggttactttcaaattggaagacagagacgtacacacaaggcaataattcagggaacaattccatccatccactgctataaaaggcggtgttggggtgttgggtctcttcagttcagtgt

SEQ ID NO: 443 - DNA, 1524 bp, Setaria italica
  source 1..1524: mol_type = genomic DNA
cctcttcctttatttttgccatcagcgtcgttgttgaactctcgtgcctgttaaagatgtgtgtgttccgctctttccaaatttcccatataatgagtagagtgagactttgcatagccttgcgcggtaagtccagtattgtagttatagaagtccatcattccaatgcattggatgagggttgccatgcagttggtctgatgcttggctgcgctaaccatgttgccgttaaatcccatatcctccttgtgttcctgcacttagcctagatgtggtgactagtttccatggtttgtctgcatagggtgcaagtggcgttgtatggccatccacgtttagcctgcctatccacggaccaaactcagttttgtgtaattagccgcaagaagaatttgcattttgccggcgcccacgttttccagacagaagagatttctggtgtttcgatgcagcccaggaactgtgctttatatgccgatgctattgtatacatgacggatcttgttagtttctagaagatagtatcctcttccacttatcgaagctcctgaccatagcccatagggcgaacgatgctagatgctaaatgtgaagtggtgatgctgttgtcgatattgaggtcacagatccagttgttactgatagcatcgtgaactgtcctattttgtcttcttgaaatgtcgaagaggagtggagcaatgtccttaggtgctggccatgtagctagccagaagtccagaagctagcctttttgccatcaccaagagtgataaccatgcaggcaacaaatacttgcatgtctgtctcgtcgcatgggatttctatgttggtccagggtttttccggtgatgcctactcatgccaaagccacctcagacggagggctcgtgcgaatttctcgaggtcagcccctcgtattgcttcagtaggcaggttttcgtccagttgactttacatttaccctcggttagctgttggtctcccgctcagaggaattttttacggatcttgtctaagtcttggagcccctctttaaggaaataataaaagaagaaactacttgtttttgcaatgataacgtacatacagatatttctaaagccatcaagtacctagcttgtctaaataacaagtgtgtcctggaacaagtatcgagtacctgaaagcaacctgctttgaattggaaaggataaaaattcgacaaggaacgaacaaaggaggcacatttcttgccggccagaaactattgggtctttgcatccttgtgaattgataaacgtgctggtgtgtttcaatgatgtccatgagatgggaatacaaagtcaagcacgccttattaccttattgtgtggctctgtctgcagaaagcaaccgggcgcattttcttccgataccgtggttactttcaaattggaagacagagacgtacacacaaggcaataattcagggaacaattccatccatccactgctataaaaggcggtgttggggtgttgggtctcttcagttcagtgtgctcaagc

SEQ ID NO: 444 - DNA, 491 bp, Setaria italica
  source 1..491: mol_type = genomic DNA
taaggaaataataaaagaagaaactacttgtttttgcaatgataacgtacatacagatatttctaaagccatcaagtacctagcttgtctaaataacaagtgtgtcctggaacaagtatcgagtacctgaaagcaacctgctttgaattggaaaggataaaaattcgacaaggaacgaacaaaggaggcacatttcttgccggccagaaactattgggtctttgcatccttgtgaattgataaacgtgctggtgtgtttcaatgatgtccatgagatgggaatacaaagtcaagcacgccttattaccttattgtgtggctctgtctgcagaaagcaaccgggcgcattttcttccgataccgtggttactttcaaattggaagacagagacgtacacacaaggcaataattcagggaacaattccatccatccactgctataaaaggcggtgttggggtgttgggtctcttcagttcagtgtgctcaagc

SEQ ID NO: 445 - DNA, 404 bp, Setaria italica
  source 1..404: mol_type = genomic DNA
aaggaaataataaaagaagaaactacttgtttttgcaatgataacgtacatacagatatttctaaagccatcaagtacctagcttgtctaaataacaagtgtgtcctggaacaagtatcgagtacctgaaagcaacctgctttgaattggaaaggataaaaattcgacaaggaacgaacaaaggaggcacatttcttgccggccagaaactattgggtctttgcatccttgtgaattgataaacgtgctggtgtgtttcaatgatgtccatgagatgggaatacaaagtcaagcacgccttattaccttattgtgtggctctgtctgcagaaagcaaccgggcgcattttcttccgataccgtggttactttcaaattggaagacagagacgtacacacaaggc

SEQ ID NO: 446 - DNA, 1392 bp, Setaria italica
  source 1..1392: mol_type = genomic DNA
cgagacccgccacctcaccagcaccactactccctctttgctacaaccagagaaagtggcggaatcttgttgaacatcccactccgtgttgatgtggttgccacgagatctgcctgcatcaagccatgttcgccacgcagccatgcgcgccgctggccatcacgccctcgcacatcatgcagttggatgtttaacccttgcgatcaaagtacgaaatagtgggctatagcgaagctatagtggcgctatagcggttgatgctagctgccgctacaacaacgttgtactaattagcgggttatagtgggctatagcggagctatagcggttgagcatagctctatgctgaatcccatagtccgctattttgtatattgcttgcgatgtgtggagctgcgtccacatagtgtgatttcagctatgcttccactaatttgtgtcgatctacattagattaagagagaagactacagagatagtagaacaaatagagagagctaatacgagagagagagagggtgacggggcttgacgcgcacaatgcacaggaacatgatgataagccttgggtctatcttggtgctgacagacgatggcctgcatgcatgattttgatatgtttttcaatcaaataatttttttgaaaaaaatcaaaaccacatcctagaaaggcgaacacactaaaaaaaactgaaaaactgaagaaattagttgaaacgtgggtttagtgtttctccccagctattgtaaaattcaaaaaataagggcaaaatatattgttgaaggtggaaataagagtagttatacataaaattgatgtacattgtttgcagtggaaaatgaaataaatagcgtatgcatatggtctttcacctgcagtatcgtacgggcgtatttgctagtatcttataagagtgtaatatagaacatcaaaaagaagagttttcaacatttgagatgtaattgcatatgtgatcaaatggttggtcaggaccgagatcaacatttgaccttagtctgcaaggggcatgggcagacggaaaccacacgacccatcggcagaaacagtgtggaggtttggttaactccagccaactaaagaaaagtgctaatctactgaacaattccatctccagccgactaacccaccgcacaatgaactggaccgaccccagtcgagaggttggttcatcgaagttcaccgcgggtggtgaaccaaacgggaagcgccgcgccgcgtcaacccaaacgccgtgagccggggccaccgcgcctccccaccgtcctcgtccacgtgcgccgcacacacgcggagaactacgccgcgcaccgccgaaacgccctgttctccctttttataccggcctcctccctccccttcgccacccgcac

SEQ ID NO: 447 - DNA, 1396 bp, Setaria italica
  source 1..1396: mol_type = genomic DNA
ccaacgagacccgccacctcaccagcaccactactccctctttgctacaaccagagaaagtggcggaatcttgttgaacatcccactccgtgttgatgtggttgccacgagatctgcctgcatcaagccatgttcgccacgcagccatgcgcgccgctggccatcacgccctcgcacatcatgcagttggatgtttaacccttgcgatcaaagtacgaaatagtgggctatagcgaagctatagtggcgctatagcggttgatgctagctgccgctacaacaacgttgtactaattagcgggttatagtgggctatagcggagctatagcggttgagcatagctctatgctgaatcccatagtccgctattttgtatattgcttgcgatgtgtggagctgcgtccacatagtgtgatttcagctatgcttccactaatttgtgtcgatctacattagattaagagagaagactacagagatagtagaacaaatagagagagctaatacgagagagagagagggtgacggggcttgacgcgcacaatgcacaggaacatgatgataagccttgggtctatcttggtgctgacagacgatggcctgcatgcatgattttgatatgtttttcaatcaaataatttttttgaaaaaaatcaaaaccacatcctagaaaggcgaacacactaaaaaaaactgaaaaactgaagaaattagttgaaacgtgggtttagtgtttctccccagctattgtaaaattcaaaaaataagggcaaaatatattgttgaaggtggaaataagagtagttatacataaaattgatgtacattgtttgcagtggaaaatgaaataaatagcgtatgcatatggtctttcacctgcagtatcgtacgggcgtatttgctagtatcttataagagtgtaatatagaacatcaaaaagaagagttttcaacatttgagatgtaattgcatatgtgatcaaatggttggtcaggaccgagatcaacatttgaccttagtctgcaaggggcatgggcagacggaaaccacacgacccatcggcagaaacagtgtggaggtttggttaactccagccaactaaagaaaagtgctaatctactgaacaattccatctccagccgactaacccaccgcacaatgaactggaccgaccccagtcgagaggttggttcatcgaagttcaccgcgggtggtgaaccaaacgggaagcgccgcgccgcgtcaacccaaacgccgtgagccggggccaccgcgcctccccaccgtcctcgtccacgtgcgccgcacacacgcggagaactacgccgcgcaccgccgaaacgccctgttctccctttttataccggcctcctccctccccttcgccacccgcac

SEQ ID NO: 448 - DNA, 2074 bp, Setaria italica
  source 1..2074: mol_type = genomic DNA
actatggcgggcgtggtgagacccccgcacgtggtgtttcttcaaggcgatgagagtgaggtggagtccaacggcggatgtggcgaggtccccgcgcattgtgttatcgcggtggcgactgcgaggcagcctaagagaggtccggattcggtggtatcactctgtcagatagagtgtggtgttgcagcggcactacagcggagggtctcgtatggcggtggccatctcggtgcagtgcagtctgtttctatcggttccctgtcgatgccggaccacgcctagacgtttcggcgagttatgagcgtggatgttggtgggtgccgccgtggcgagcagagcggtgagaccgtgttgatgtcccaatccaatcggtagggtgtgatagttttggtgttgagtggctatctgcattgatgtcctaatccgaccaggcgagtttgtattgtttttcttttcttttccttttatattttttcagtctgaaattctttttttaatataatcggcagctctccaatatggttcgttcaaaaaaaagaatttttaagaaaagatagataaaaagataaaccaaattctgaattgtgattcagataccctcgaaatggaagttggcctgtccacttaaaattgaacgcatgattccgtcaataattcagtgccgtcctcctgtttactctttaattcttattacgtgacatcggcccgttgataagccgtgctccttgtcgctaattcttattacgtgctgatagaggcgagtcaatcaaacgttgcactttgtaacccttaatctttgctaagagtcacatgaccccgtacatctcgatcgatcctcttttagttggcgcgcgggttttaccatgtgaagcaatgtgccggcatgctgctgtcgcaactagctcttcatcaagctatcgacagatgagatgcgctcccattggaaccgaaatgggtggaaattctgttcgattctgtcgtgccgaccgtgcgaaagtgaaaccacccttcccctcgccgcaggcatgtagtccgcgtggattttgaacaccacagctgacatatgcctccatgtccattcctgccgtgggaatctctgcacctggtctgcctagtcctacaggctgcggccgcaccatctaaatgcatgtttgaatatcagtagttaaattttatcacatgtcacatcggatattcggatgctaattagtaggactaaacatagctaattataaaattaattgcagaacttcggggctaattcatgagaccaatttattgaggctaattaatctatcattagcaaatggttactgtagcaccatattgtcaaatcatggactaattagccttaatagatttatctcacaaattagactccatctgtgtaattagttttataattagattatatttaatacttctaattagtatccaaatatccgatgtgactgtgaagtttaacacatgtgagccaaacacccccgaccacccggtcgccgcgccgcgccgcgccgttggatgccgcctcgccacgccatgcgacgcaacgccctgcactgcatttcgtggccttgcgtaggggcaccggaagagccgctggttcgtttcgttcgtcccctggccgcgtcagctgatttgcgagcagggtcgaatcgatcgcgcgcggtcgccgcatcccaccaagccggagcccttcggggcccctctaaaagcaagtcaggctcgcgaagtgaccgaaaagatacattactaccagctgcagcgctgctgttggccctgccctcgtcaagatctgacttttgaatcgcataattagcagcttgtttattaagcttaaacgattgatcctactccttgccgacagggccgcgagcaaagtcaactgctcgacacctcctcggccaacgtgcctatatattctcggctagccgcgtccgtactcatccaacccaactccaagcacctcatcagattcctcgcctccgtctccgaccacccaccagtcaggtaactagctagagaggaagagatcaccggccggcgatcgattattaacgcgtcaggagaagcg

SEQ ID NO: 449 - DNA, 2035 bp, Setaria italica
  source 1..2035: mol_type = genomic DNA
tcttcaaggcgatgagagtgaggtggagtccaacggcggatgtggcgaggtccccgcgcattgtgttatcgcggtggcgactgcgaggcagcctaagagaggtccggattcggtggtatcactctgtcagatagagtgtggtgttgcagcggcactacagcggagggtctcgtatggcggtggccatctcggtgcagtgcagtctgtttctatcggttccctgtcgatgccggaccacgcctagacgtttcggcgagttatgagcgtggatgttggtgggtgccgccgtggcgagcagagcggtgagaccgtgttgatgtcccaatccaatcggtagggtgtgatagttttggtgttgagtggctatctgcattgatgtcctaatccgaccaggcgagtttgtattgtttttcttttcttttccttttatattttttcagtctgaaattctttttttaatataatcggcagctctccaatatggttcgttcaaaaaaagaatttttaagaaaagatagataaaaagataaaccaaattctgaattgtgattcagataccctcgaaatggaagttggcctgtccacttaaaattgaacgcatgattccgtcaataattcagtgccgtcctcctgtttactctttaattcttattacgtgacatcggcccgttgataagccgtgctccttgtcgctaattcttattacgtgctgatagaggcgagtcaatcaaacgttgcactttgtaacccttaatctttgctaagagtcacatgaccccgtacatctcgatcgatcctcttttagttggcgcgcgggttttaccatgtgaagcaatgtgccggcatgctgctgtcgcaactagctcttcatcaagctatcgacagatgagatgcgctcccattggaaccgaaatgggtggaaattctgttcgattctgtcgtgccgaccgtgcgaaagtgaaaccacccttcccctcgccgcaggcatgtagtccgcgtggattttgaacaccacagctgacatatgcctccatgtccattcctgccgtgggaatctctgcacctggtctgcctagtcctacaggctgcggccgcaccatctaaatgcatgtttgaatatcagtagttaaattttatcacatgtcacatcggatattcggatgctaattagtaggactaaacatagctaattataaaattaattgcagaacttcggggctaattcatgagaccaatttattgaggctaattaatctatcattagcaaatggttactgtagcaccatattgtcaaatcatggactaattagccttaatagatttatctcacaaattagactccatctgtgtaattagttttataattagattatatttaatacttctaattagtatccaaatatccgatgtgactgtgaagtttaacacatgtgagccaaacacccccgaccacccggtcgccgcgccgcgccgcgccgttggatgccgcctcgccacgccatgcgacgcaacgccctgcactgcatttcgtggccttgcgtaggggcaccggaagagccgctggttcgtttcgttcgtcccctggccgcgtcagctgatttgcgagcagggtcgaatcgatcgcgcgcggtcgccgcatcccaccaagccggagcccttcggggcccctctaaaagcaagtcaggctcgcgaagtgaccgaaaagatacattactaccagctgcagcgctgctgttggccctgccctcgtcaagatctgacttttgaatcgcataattagcagcttgtttattaagcttaaacgattgatcctactccttgccgacagggccgcgagcaaagtcaactgctcgacacctcctcggccaacgtgcctatatattctcggctagccgcgtccgtactcatccaacccaactccaaacacctcatcagattcctcgcctccgtctccgaccacccaccagtcaggtaactagctagagaggaagagatcaccggccggcgatcgattattaacgcgtcaggagaagcg

SEQ ID NO: 450 - DNA, 380 bp, Setaria italica
  source 1..380: mol_type = genomic DNA
cgacggcccgggctggtctgcagcgctgctgttggccctgccctcgtcaagatctgacttttgaatcgcataattagcagcttgtttattaagcttaaacgattgatcctactccttgccgacagggccgcgagcaaagtcaactgctcgacacctcctcggccaacgtgcctatatattctcggctagccgcgtccgtactcatccaacccaactccaagcacctcatcagattcctcgcctccgtctccgaccacccaccagtcaggtaactagctagagaggaagagatcaccggccggcgatcgattattaacgcgtcaggagaagcgatggctcggcaacaaggcgccgtggtgttctcgttgcttgcggcggtg

SEQ ID NO: 451 - DNA, 590 bp, Setaria italica
  source 1..590: mol_type = genomic DNA
ccgaccacccggtcgccgcgccgcgccgcgccgttggatgccgcctcgccacgccatgcgacgcaacgccctgcactgcatttcgtggccttgcgtaggggcaccggaagagccgctggttcgtttcgttcgtcccctggccgcgtcagctgatttgcgagcagggtcgaatcgatcgcgcgcggtcgccgcatcccaccaagccggagcccttcggggcccctctaaaagcaagtcaggctcgcgaagtgaccgaaaagatacattactaccagctgcagcgctgctgttggccctgccctcgtcaagatctgacttttgaatcgcataattagcagcttgtttattaagcttaaacgattgatcctactccttgccgacagggccgcgagcaaagtcaactgctcgacacctcctcggccaacgtgcctatatattctcggctagccgcgtccgtactcatccaacccaactccaaacacctcatcagattcctcgcctccgtctccgaccacccaccagtcaggtaactagctagagaggaagagatcaccggccggcgatcgattattaacgcgtcaggagaagcg

SEQ ID NO: 452 - DNA, 1794 bp, Setaria italica
  source 1..1794: mol_type = genomic DNA
gagacccccgcacgtggtgtttcttcaaggcgatgagagtgaggtggagtccaacggcggatgtggcgaggtccccgcgcattgtgttatcgcggtggcgactgcgaggcagcctaagagaggtccggattcggtggtatcactctgtcagatagagtgtggtgttgcagcggcactacagcggagggtctcgtatggcggtggccatctcggtgcagtgcagtctgtttctatcggttccctgtcgatgccggaccacgcctagacgtttcggcgagttatgagcgtggatgttggtgggtgccgccgtggcgagcagagcggtgagaccgtgttgatgtcccaatccaatcggtagggtgtgatagttttggtgttgagtggctatctgcattgatgtcctaatccgaccaggcgagtttgtattgtttttcttttcttttccttttatattttttcagtctgaaattctttttttaatataatcggcagctctccaatatggttcgttcaaaaaaaagaatttttaagaaaagatagataaaaagataaaccaaattctgaattgtgattcagataccctcgaaatggaagttggcctgtccacttaaaattgaacgcatgattccgtcaataattcagtgccgtcctcctgtttactctttaattcttattacgtgacatcggcccgttgataagccgtgctccttgtcgctaattcttattacgtgctgatagaggcgagtcaatcaaacgttgcactttgtaacccttaatctttgctaagagtcacatgaccccgtacatctcgatcgatcctcttttagttggcgcgcgggttttaccatgtgaagcaatgtgccggcatgctgctgtcgcaactagctcttcatcaagctatcgacagatgagatgcgctcccattggaaccgaaatgggtggaaattctgttcgattctgtcgtgccgaccgtgcgaaagtgaaaccacccttcccctcgccgcaggcatgtagtccgcgtggattttgaacaccacagctgacatatgcctccatgtccattcctgccgtgggaatctctgcacctggtctgcctagtcctacaggctgcggccgcaccatctaaatgcatgtttgaatatcagtagttaaattttatcacatgtcacatcggatattcggatgctaattagtaggactaaacatagctaattataaaattaattgcagaacttcggggctaattcatgagaccaatttattgaggctaattaatctatcattagcaaatggttactgtagcaccatattgtcaaatcatggactaattagccttaatagatttatctcacaaattagactccatctgtgtaattagttttataattagattatatttaatacttctaattagtatccaaatatccgatgtgactgtgaagtttaacacatgtgagccaaacacccccgaccacccggtcgccgcgccgcgccgcgccgttggatgccgcctcgccacgccatgcgacgcaacgccctgcactgcatttcgtggccttgcgtaggggcaccggaagagccgctggttcgtttcgttcgtcccctggccgcgtcagctgatttgcgagcagggtcgaatcgatcgcgcgcggtcgccgcatcccaccaagccggagcccttcggggcccctctaaaagcaagtcaggctcgcgaagtgaccgaaaagatacattactaccagctgcagcgctgctgttggccctgccctcgtcaagatctgacttttgaatcgc

SEQ ID NO: 453 - DNA, 590 bp, Setaria italica
  source 1..590: mol_type = genomic DNA
ccgaccacccggtcgccgcgccgcgccgcgccgttggatgccgcctcgccacgccatgcgacgcaacgccctgcactgcatttcgtggccttgcgtaggggcaccggaagagccgctggttcgtttcgttcgtcccctggccgcgtcagctgatttgcgagcagggtcgaatcgatcgcgcgcggtcgccgcatcccaccaagccggagcccttcggggcccctctaaaagcaagtcaggctcgcgaagtgaccgaaaagatacattactaccagctgcagcgctgctgttggccctgccctcgtcaagatctgacttttgaatcgcataattagcagcttgtttattaagcttaaacgattgatcctactccttgccgacagggccgcgagcaaagtcaactgctcgacacctcctcggccaacgtgcctatatattctcggctagccgcgtccgtactcatccaacccaactccaagcacctcatcagattcctcgcctccgtctccgaccacccaccagtcaggtaactagctagagaggaagagatcaccggccggcgatcgattattaacgcgtcaggagaagcg

SEQ ID NO: 454 - DNA, 1815 bp, Setaria italica
  source 1..1815: mol_type = genomic DNA
caaagttcgtgttttcagaagggctagcttttttgtaagactagcaaaatgacttagcatcttaccttactagtggtacggagatgttaaataactaaatatgagaaattcctataaaaatcaagcaccattaaaatttttaccacgggagttaatttgcttctaaattacccactcattccactaaaatagtaaatatatacagtacccacatccattattgtaaaaatagcataaactaaccattattctgcattcaaattatacatggatatttaatctacatctaaaataaccaaaattaccattatacgtgcttctaaataccaacttttggargcttgcagtggaaactgtccatccaggtaaaatcagaatgtttccactaaaatgttataaagatttcttgtggtgaaacttatatatatagatttgagcctctaactcaacacgaatgtttgtatctgctaattctttttttccaatggtaggcgatgggatcatcaacatcaaggtagctgtggtgacttcatgagtctgaagatttgttgaactagtagtctttcgatcgaagatgttcataagtataggatgttcatgtatgaattcagagggtttttgcgtgtgagcatttttgcacgcgtccgcatctttacaatgttttaaaatcaccaacttctgtcattttctacctttatagttcttctctagttgaattcattttatttgattgcactttaaatagaatcatctatatgtttactaaaatattattacatatatacattgatgttttaatcgtaaacacatcaattattttagaaaaaaatacatgactacactcatagttgttctatagaggaaattgattcttgggtactttggtgaaagctgaaacatctatttattccattacagtaaccaagagtatagtaactaaaaatctaaattcttaatagaatccatatatagcatatagaataataggtacaacatgctatagagtttcaagttaatatttggagaattttttttggcatacgaattgcagtaggtaagattgaatgggaagccaaaatctggattcatgaagtcacaagagatgagcttgaacagaagctgtcataattcaagctaattttgattaaacatatatcaaacgcaccgcgttacgatacaataggaaataaactatgaatgggtattaaaaaacatacacaataatttataacctaaatatatgataaagatcacagcgcatttatgtaattaatgcatcttaaagttgccattagtggggaatgcaagtgtttttctccgcaaacccgcatataccatctcaaaaaatgacgtacatgtacatgcgggttcgcggacaagcccatttgtatctctattgctagccacatgggagcacaagttgatggattagttgaacactatcaggcaacatgtaattaaacagtgtttgttttgaacttcgtgcaagtgagatacttttacttggtctccaaatgcatgcattctctgaaattaccaatcttatcctagtgtgaaccaacaaaaatgtacacacaaccagaccatgtcgtttccaggttggaacgcaaactaaattgtcaatctttgcaaagcaaccaagaattacgagatcaacaatttttgtggcgccgaagagtgctcctcaaagtgccaagcgttagtgtgctagctaggccgtaacgaaacttgtggcgcatactgccttttgaggcgccgcgcccgtgtatatatacgccccctcatgcatgctctccttgagcaggcagccaggca

SEQ ID NO: 455 - DNA, 1864 bp, Setaria italica
  source 1..1864: mol_type = genomic DNA
ccaaaatttacaaaccttatacaaaatagtataatccagtacgaactttcaaagttcgtgttttcagaagggctagcttttttgtaagactagcaaaatgacttagcatcttaccttactagtggtacggagatgttaaataactaaatatgagaaattcctataaaaatcaagcaccattaaaatttttaccacgggagttaatttgcttctaaattacccactcattccactaaaatagtaaatatatacagtacccacatccattattgtaaaaatagcataaactaaccattattctgcattcaaattatacatggatatttaatctacatctaaaataaccaaaattaccattatacgtgcttctaaataccaacttttggargcttgcagtggaaactgtccatccaggtaaaatcagaatgtttccactaaaatgttataaagatttcttgtggtgaaacttatatatatagatttgagcctctaactcaacacgaatgtttgtatctgctaattctttttttccaatggtaggcgatgggatcatcaacatcaaggtagctgtggtgacttcatgagtctgaagatttgttgaactagtagtctttcgatcgaagatgttcataagtataggatgttcatgtatgaattcagagggtttttgcgtgtgagcatttttgcacgcgtccgcatctttacaatgttttaaaatcaccaacttctgtcattttctacctttatagttcttctctagttgaattcattttatttgattgcactttaaatagaatcatctatatgtttactaaaatattattacatatatacattgatgttttaatcgtaaacacatcaattattttagaaaaaaatacatgactacactcatagttgttctatagaggaaattgattcttgggtactttggtgaaagctgaaacatctatttattccattacagtaaccaagagtatagtaactaaaaatctaaattcttaatagaatccatatatagcatatagaataataggtacaacatgctatagagtttcaagttaatatttggagaattttttttggcatacgaattgcagtaggtaagattgaatgggaagccaaaatctggattcatgaagtcacaagagatgagcttgaacagaagctgtcataattcaagctaattttgattaaacatatatcaaacgcaccgcgttacgatacaataggaaataaactatgaatgggtattaaaaaacatacacaataatttataacctaaatatatgataaagatcacagcgcatttatgtaattaatgcatcttaaagttgccattagtggggaatgcaagtgtttttctccgcaaacccgcatataccatctcaaaaaatgacgtacatgtacatgcgggttcgcggacaagcccatttgtatctctattgctagccacatgggagcacaagttgatggattagttgaacactatcaggcaacatgtaattaaacagtgtttgttttgaacttcgtgcaagtgagatacttttacttggtctccaaatgcatgcattctctgaaattaccaatcttatcctagtgtgaaccaacaaaaatgtacacacaaccagaccatgtcgtttccaggttggaacgcaaactaaattgtcaatctttgcaaagcaaccaagaattacgagatcaacaatttttgtggcgccgaagagtgctcctcaaagtgccaagcgttagtgtgctagctaggccgtaacgaaacttgtggcgcatactgccttttgaggcgccgcgcccgtgtatatatacgccccctcatgcatgctctccttgagcaggcagccaggca

SEQ ID NO: 456 - DNA, 2263 bp, Setaria italica
  source 1..2263: mol_type = genomic DNA
caaagttcgtgttttcagaagggctagcttttttgtaagactagcaaaatgacttagcatcttaccttactagtggtacggagatgttaaataactaaatatgagaaattcctataaaaatcaagcaccattaaaatttttaccacgggagttaatttgcttctaaattacccactcattccactaaaatagtaaatatatacagtacccacatccattattgtaaaaatagcataaactaaccattattctgcattcaaattatacatggatatttaatctacatctaaaataaccaaaattaccattatacgtgcttctaaataccaacttttggaagcttgcagtggaaactgtccatccaggtaaaatcagaatgtttccactaaaatgttataaagatttcttgtggtgaaacttatatatatagatttgagcctctaactcaacacgaatgtttgtatctgctaattctttttttccaatggtaggcgatgggatcatcaacatcaaggtagctgtggtgacttcatgagtatgaagatttgttgaactagtagtctttcgaagatgttcttaagtgtaggatgttcatgtatgaattcagagggtttttgcgtgtgagcatttttgcacgcgtccgcgtctttacaatgttttaaaaattcaccaacttctgtcattttctacctttatagttcttctctagttgaaaccaaattatttaatctacatctaaaataacccaaattaccattatacgtgcttctaaataccaacttttggaagcttgcagtggaaactgtccatccaggtaaaatcagaatgtttccacttaaatattatgaagatttcttgtggtgaaatatatatatagatttgagcctctaactcaacacgaatgtttgtatctgctaattcttttttccaatggtaggcgatgggatcatcaacatcaaggtagctgtggtgacttcatgagtctgaagatttgttgaactagtagtctttcgatcgaagatgttcataagtataggatgttcatgtatgaattcagagggtttttgcgtgtgagcatttttgcacgcgtccgcatctttacaatgttttaaaatcaccaacttctgtcattttctacctttatagttcttctctagttgaattcattttatttgattgcactttaaatagaatcatctatatgtttactaaaatattattacatatatacattgatgttttaatcgtaaacacatcaattattttagaaaaaaatacatgactacactcatagttgttctatagaggaaatttgatatcttgggtactttggtgaaagctgaaacatctatttattccattacagtaaccaagagtatagtaactaaaaatctaaattcttaatagaatccatatatagcatatagaataataggtacaacatgctatagagtttcaagttaatatttggagaattttttttggcatacgaattgcagtaggtaagattgaatgggaagccaaaatctggattcatgaagtcacaagagatgagcttgaacagaagctgtcataattcaagctaattttgattaaacatatatcaaacgcaccgcgttacgatacaataggaaataaactatgaatgggtattaaaaaacatacacaataatttataacctaaatatatgataaagatcacagcgcatttatgtaattaatgcatcttaaagttgccattagtggggaatgcaagtgtttttctccgcaaacccgcatataccatctcaaaaaatgacgtacatgtacatgcgggttcgcggacaagcccatttgtatctctattgctagccacatgggagcacaagttgatggattagttgaacactatcaggcaacatgtaattaaacagtgtttgttttgaacttcgtgcaagtgagatacttttacttggtctccaaatgcatgcattctctgaaattaccaatcttatcctagtgtgaaccaacaaaaatgtacacacaaccagaccatgtcgtttccaggttggaacgcaaactaaattgtcaatctttgcaaagcaaccaagaattacgagatcaacaatttttgtggcgccgaagagtgctcctcaaagtgccaagcgttagtgtgctagctaggccgtaacgaaacttgtggcgcatactgccttttgaggcgccgcgcccgtgtatatatacgccccctcatgcatgctctccttgagcaggcagccaggca

SEQ ID NO: 457 - DNA, 2348 bp, Setaria italica
  source 1..2348: mol_type = genomic DNA
actatagggcacgcgtggtcgacggcccgggctggtccaaaatttacaaaccttatacaaaatagtataatccagtacgaactttcaaagttcgtgttttcagaagggctagcttttttgtaagactagcaaaatgacttagcatcttaccttactagtggtacggagatgttaaataactaaatatgagaaattcctataaaaatcaagcaccattaaaatttttaccacgggagttaatttgcttctaaattacccactcattccactaaaatagtaaatatatacagtacccacatccattattgtaaaaatagcataaactaaccattattctgcattcaaattatacatggatatttaatctacatctaaaataaccaaaattaccattatacgtgcttctaaataccaacttttggaagcttgcagtggaaactgtccatccaggtaaaatcagaatgtttccactaaaatgttataaagatttcttgtggtgaaacttatatatatagatttgagcctctaactcaacacgaatgtttgtatctgctaattctttttttccaatggtaggcgatgggatcatcaacatcaaggtagctgtggtgacttcatgagtatgaagatttgttgaactagtagtctttcgaagatgttcttaagtgtaggatgttcatgtatgaattcagagggtttttgcgtgtgagcatttttgcacgcgtccgcgtctttacaatgttttaaaaattcaccaacttctgtcattttctacctttatagttcttctctagttgaaaccaaattatttaatctacatctaaaataacccaaattaccattatacgtgcttctaaataccaacttttggaagcttgcagtggaaactgtccatccaggtaaaatcagaatgtttccacttaaatattatgaagatttcttgtggtgaaatatatatatagatttgagcctctaactcaacacgaatgtttgtatctgctaattcttttttccaatggtaggcgatgggatcatcaacatcaaggtagctgtggtgacttcatgagtctgaagatttgttgaactagtagtctttcgatcgaagatgttcataagtataggatgttcatgtatgaattcagagggtttttgcgtgtgagcatttttgcacgcgtccgcatctttacaatgttttaaaatcaccaacttctgtcattttctacctttatagttcttctctagttgaattcattttatttgattgcactttaaatagaatcatctatatgtttactaaaatattattacatatatacattgatgttttaatcgtaaacacatcaattattttagaaaaaaatacatgactacactcatagttgttctatagaggaaatttgatatcttgggtactttggtgaaagctgaaacatctatttattccattacagtaaccaagagtatagtaactaaaaatctaaattcttaatagaatccatatatagcatatagaataataggtacaacatgctatagagtttcaagttaatatttggagaattttttttggcatacgaattgcagtaggtaagattgaatgggaagccaaaatctggattcatgaagtcacaagagatgagcttgaacagaagctgtcataattcaagctaattttgattaaacatatatcaaacgcaccgcgttacgatacaataggaaataaactatgaatgggtattaaaaaacatacacaataatttataacctaaatatatgataaagatcacagcgcatttatgtaattaatgcatcttaaagttgccattagtggggaatgcaagtgtttttctccgcaaacccgcatataccatctcaaaaaatgacgtacatgtacatgcgggttcgcggacaagcccatttgtatctctattgctagccacatgggagcacaagttgatggattagttgaacactatcaggcaacatgtaattaaacagtgtttgttttgaacttcgtgcaagtgagatacttttacttggtctccaaatgcatgcattctctgaaattaccaatcttatcctagtgtgaaccaacaaaaatgtacacacaaccagaccatgtcgtttccaggttggaacgcaaactaaattgtcaatctttgcaaagcaaccaagaattacgagatcaacaatttttgtggcgccgaagagtgctcctcaaagtgccaagcgttagtgtgctagctaggccgtaacgaaacttgtggcgcatactgccttttgaggcgccgcgcccgtgtatatatacgccccctcatgcatgctctccttgagcaggcagccaggca

SEQ ID NO: 458 - DNA, 2262 bp, Setaria italica
  source 1..2262: mol_type = genomic DNA
caaagttcgtgttttcagaagggctagcttttttgtaagactagcaaaatgacttagcatcttaccttactagtggtacggagatgttaaataactaaatatgagaaattcctataaaaatcaagcaccattaaaatttttaccacgggagttaatttgcttctaaattacccactcattccactaaaatagtaaatatatacagtacccacatccattattgtaaaaatagcataaactaaccattattctgcattcaaattatacatggatatttaatctacatctaaaataaccaaaattaccattatacgtgcttctaaataccaacttttggaagcttgcagtggaaactgtccatccaggtaaaatcagaatgtttccactaaaatgttataaagatttcttgtggtgaaacttatatatatagatttgagcctctaactcaacacgaatgtttgtatctgctaattctttttttccaatggtaggcgatgggatcatcaacatcaaggtagctgtggtgacttcatgagtatgaagatttgttgaactagtagtctttcgaagatgttcttaagtgtaggatgttcatgtatgaattcagagggtttttgcgtgtgagcatttttgcacgcgtccgcgtctttacaatgttttaaaaattcaccaacttctgtcattttctacctttatagttcttctctagttgaaaccaaattatttaatctacatctaaaataacccaaattaccattatacgtgcttctaaataccaacttttggaagcttgcagtggaaactgtccatccaggtaaaatcagaatgtttccacttaaatattatgaagatttcttgtggtgaaatatatatatagatttgagcctctaactcaacacgaatgtttgtatctgctaattcttttttccaatggtaggcgatgggatcatcaacatcaaggtagctgtggtgacttcatgagtctgaagatttgttgaactagtagtctttcgatcgaagatgttcataagtataggatgttcatgtatgaattcagagggtttttgcgtgtgagcatttttgcacgcgtccgcatctttacaatgttttaaaatcaccaacttctgtcattttctacctttatagttcttctctagttgaattcattttatttgattgcactttaaatagaatcatctatatgtttactaaaatattattacatatatacattgatgttttaatcgtaaacacatcaattattttagaaaaaaatacatgactacactcatagttgttctatagaggaaatttgatatcttgggtactttggtgaaagctgaaacatctatttattccattacagtaaccaagagtatagtaactaaaaatctaaattcttaatagaatccatatatagcatatagaataataggtacaacatgctatagagtttcaagttaatatttggagaattttttttggcatacgaattgcagtaggtaagattgaatgggaagccaaaatctggattcatgaagtcacaagagatgagcttgaacagaagctgtcataattcaagctaattttgattaaacatatatcaaacgcaccgcgttacgatacaataggaaataaactatgaatgggtattaaaaaacatacacaataatttataacctaaatatatgataaagatcacagcgcatttatgtaattaatgcatcttaaagttgccattagtggggaatgcaagtgtttttctccgcaaacccgcatataccatctcaaaaaatgacgtacatgtacatgcgggttcgcggacaagcccatttgtatctctattgctagccacatgggagcacaagttgatggattagttgaacactatcaggcaacatgtaattaaacagtgtttgttttgaacttcgtgcaagtgagatacttttacttggtctccaaatgcatgcattctctgaaattaccaatcttatcctagtgtgaaccaacaaaaatgtacacacaaccagaccatgtcgtttccaggttggaacgcaaactaaattgtcaatctttgcaaagcaaccaagaattacgagatcaacaatttttgtggcgccgaagagtgctcctcaaagtgccaagcgttagtgtgctagctaggccgtaacgaaacttgtggcgcatactgccttttgaggcgccgcgcccgtgtatatatacgccccctcatgcatgctctccttgagcaggcagccaggc

SEQ ID NO: 459 - DNA, 1967 bp, Setaria italica
  source 1..1967: mol_type = genomic DNA
ccaaaatttacaaaccttatacaaaatagtataatccagtacgaactttcaaagttcgtgttttcagaagggctagcttttttgtaagactagcaaaatgacttagcatcttaccttactagtggtacggagatgttaaataactaaatatgagaaattcctataaaaatcaagcaccattaaaatttttaccacgggagttaatttgcttctaaattacccactcattccactaaaatagtaaatatatacagtacccacatccattattgtaaaaatagcataaactaaccattattctgcattcaaattatacatggatatttaatctacatctaaaataaccaaaattaccattatacgtgcttctaaataccaacttttggargcttgcagtggaaactgtccatccaggtaaaatcagaatgtttccactaaaatgttataaagatttcttgtggtgaaacttatatatatagatttgagcctctaactcaacacgaatgtttgtatctgctaattctttttttccaatggtaggcgatgggatcatcaacatcaaggtagctgtggtgacttcatgagtctgaagatttgttgaactagtagtctttcgatcgaagatgttcataagtataggatgttcatgtatgaattcagagggtttttgcgtgtgagcatttttgcacgcgtccgcatctttacaatgttttaaaatcaccaacttctgtcattttctacctttatagttcttctctagttgaattcattttatttgattgcactttaaatagaatcatctatatgtttactaaaatattattacatatatacattgatgttttaatcgtaaacacatcaattattttagaaaaaaatacatgactacactcatagttgttctatagaggaaattgattcttgggtactttggtgaaagctgaaacatctatttattccattacagtaaccaagagtatagtaactaaaaatctaaattcttaatagaatccatatatagcatatagaataataggtacaacatgctatagagtttcaagttaatatttggagaattttttttggcatacgaattgcagtaggtaagattgaatgggaagccaaaatctggattcatgaagtcacaagagatgagcttgaacagaagctgtcataattcaagctaattttgattaaacatatatcaaacgcaccgcgttacgatacaataggaaataaactatgaatgggtattaaaaaacatacacaataatttataacctaaatatatgataaagatcacagcgcatttatgtaattaatgcatcttaaagttgccattagtggggaatgcaagtgtttttctccgcaaacccgcatataccatctcaaaaaatgacgtacatgtacatgcgggttcgcggacaagcccatttgtatctctattgctagccacatgggagcacaagttgatggattagttgaacactatcaggcaacatgtaattaaacagtgtttgttttgaacttcgtgcaagtgagatacttttacttggtctccaaatgcatgcattctctgaaattaccaatcttatcctagtgtgaaccaacaaaaatgtacacacaaccagaccatgtcgtttccaggttggaacgcaaactaaattgtcaatctttgcaaagcaaccaagaattacgagatcaacaatttttgtggcgccgaagagtgctcctcaaagtgccaagcgttagtgtgctagctaggccgtaacgaaacttgtggcgcatactgccttttgaggcgccgcgcccgtgtatatatacgccccctcatgcatgctctccttgagcaggcagccaggcacgcaccaataccaagcctctcccgggccagcttctagcattggctcatcaccagcactccagcaggcaggcaaaacgcaagcaacacctctccgccagacatc

SEQ ID NO: 460 - DNA, 1827 bp, Setaria italica
  source 1..1827: mol_type = genomic DNA
tcttcaaggcgatgagagtgaggtggagtccaacggcggatgtggcgaggtccccgcgcattgtgttatcgcggtggcgactgcgaggcagcctaagagaggtccggattcggtggtatcactctgtcagatagagtgtggtgttgcagcggcactacagcggagggtctcgtatggcggtggccatctcggtgcagtgcagtctgtttctatcggttccctgtcgatgccggaccacgcctagacgtttcggcgagttatgagcgtggatgttggtgggtgccgccgtggcgagcagagcggtgagaccgtgttgatgtcccaatccaatcggtagggtgtgatagttttggtgttgagtggctatctgcattgatgtcctaatccgaccaggcgagtttgtattgtttttcttttcttttccttttatattttttcagtctgaaattctttttttaatataatcggcagctctccaatatggttcgttcaaaaaaagaatttttaagaaaagatagataaaaagataaaccaaattctgaattgtgattcagataccctcgaaatggaagttggcctgtccacttaaaattgaacgcatgattccgtcaataattcagtgccgtcctcctgtttactctttaattcttattacgtgacatcggcccgttgataagccgtgctccttgtcgctaattcttattacgtgctgatagaggcgagtcaatcaaacgttgcactttgtaacccttaatctttgctaagagtcacatgaccccgtacatctcgatcgatcctcttttagttggcgcgcgggttttaccatgtgaagcaatgtgccggcatgctgctgtcgcaactagctcttcatcaagctatcgacagatgagatgcgctcccattggaaccgaaatgggtggaaattctgttcgattctgtcgtgccgaccgtgcgaaagtgaaaccacccttcccctcgccgcaggcatgtagtccgcgtggattttgaacaccacagctgacatatgcctccatgtccattcctgccgtgggaatctctgcacctggtctgcctagtcctacaggctgcggccgcaccatctaaatgcatgtttgaatatcagtagttaaattttatcacatgtcacatcggatattcggatgctaattagtaggactaaacatagctaattataaaattaattgcagaacttcggggctaattcatgagaccaatttattgaggctaattaatctatcattagcaaatggttactgtagcaccatattgtcaaatcatggactaattagccttaatagatttatctcacaaattagactccatctgtgtaattagttttataattagattatatttaatacttctaattagtatccaaatatccgatgtgactgtgaagtttaacacatgtgagccaaacacccccgaccacccggtcgccgcgccgcgccgcgccgttggatgccgcctcgccacgccatgcgacgcaacgccctgcactgcatttcgtggccttgcgtaggggcaccggaagagccgctggttcgtttcgttcgtcccctggccgcgtcagctgatttgcgagcagggtcgaatcgatcgcgcgcggtcgccgcatcccaccaagccggagcccttcggggcccctctaaaagcaagtcaggctcgcgaagtgaccgaaaagatacattactaccagctgcagcgctgctgttggccctgccctcgtcaagatctgacttttgaatcgcataattagcagcttgtttattaagcttaaacgattgatcctactccttgccgaca

SEQ ID NO: 461 - DNA, 1069 bp, Setaria italica
  source 1..1069: mol_type = genomic DNA
gtcatagacattcttaatagagcatgggctcgcttccatcaacgtcactcaagtgaattcaaggagcaacttcatatccactttgaattcccggtatgtattgaatttgcacatctcatgtcacttccttgaacccaacaaatatttcataacttcttttaccgtatatatagtgtttgagatagaatctgaagaataatttatgcggatactacgtatatgagtttatccatggctttgtaggttccaagcgtataactgaccatgaattcagagtacatatacaaatttcttaacaataaattagttctaattgttcagatccattgatctaatataataacctttgctaatgacatagattatgcacatgaaagaggaactcctcgagatagaaaaaatcagggcaattcaataacaactcagtggaattcttttagatgaggtagtaaatccagtaggagagttccataatgatggatcaaatatacatcaccgtcaggactcgggtccagaatagttgatctaaaatgttgaacttggagagttgatgcaacgtaatattattcatataagtgtatgcacaatatgtctatgtataatattatcttaattgtaatattatagatcaaatacaacttcatatattgcgtattcgtaagaaaaaaatacaaaatactaatatagaataaagaaacagaaaagaaaagaaaagaaaagaaatataaaagaaaaaaagaatttagtatcggttggtctccccagccagtactaaaggaacccttttgtactgacttagcaatactggttgcacaatcggtactaaaggggggtttggacctagtactgaaggcgcttcctcagcagtggctcacctctccattagtgttggggagcccactctatcgctttatcgtctctcttccatgtaagcaaaatgatacttggccggcctcctatgagccagctgagttgttattgattgaggacgcctcacagatgctttccagtagcaggccgataggcattatttaaacccttcgtaggcactaacccagcaatagcatca

SEQ ID NO: 462 - DNA, 980 bp, Setaria italica
  source 1..980: mol_type = genomic DNA
aactccatgccgtggtgcctccacacgcgcagcctccgttgtgcctccttgcgtgcagcctccgcgctgttgcacctagctcgtgtgtggaccgctgcacctcctcgccgctatagcaccctccgctgagagcaagggccaacactgccctcgtgcaaccgccagctgctacccccgtagcccactgcccgagcagactcggccccgtgctcgctggatccggtcgcaactcatcgctgcatcgcgtgcgcccgcagcagatccgggcgagctcacagcagactcgggcaggcccatcttattgggccctgttgcggccatcctagctgccacacagggttccggcggcggcacggcagggttgagggaggaaagggtggcggccctcgggttgcgcggtccgccaatgccgcctctgagaaggagcgatgtggggttgtggatgccgtggccgctttagtgtacaactagttgcatccttatgctactacttttgtagattgctgttgtttacagctccgtaaatgctttatttctgtgttttcctctcatgattgtttttttaactattattgtatctctgacatttccctttcagtatattattttttcgtatatgcatagctgggagcctgggacatgtgcggaggtgcagcaagtactacctccgtccataaatctataacattttcattttttaagtcctaaacatgcaagtcagtacaagtgcgagtctacaccgcaaatacagatactgtttccctttcccaaaattgttttaatgtaggcgaccacacaacttgccctccacaacttgccatccacacatgccccatatgcgtgcacctaaattactgattactgagatacgcactcaatcacctgatcaaatataatcaagtgtagctcgatcgctaagccaggccgatgcactctatttaaacctatagcaaggaacttatagcgaagcaaacacatct

SEQ ID NO: 463 - DNA, 2277 bp, Setaria italica
  source 1..2277: mol_type = genomic DNA
tatcccctcctgtttcataaaaaaaatgaggatcagtggaaagctttgctttccaataccttggtaaaaattgctgtgtcgcggtgccaggagtttaccttctcgatctcatttacattccacatttcatattgcactttacattccgtgtttacctttcctagaattcttgcatgtgtaatttataggattggaacctagagtgcaaaactcttttgtagtagaaatagcaacacataaaaaactagtgcacatctagatagaaattgaaatacgtttttataggtgcatggagccttaatttttataacaccaaattcaccccctgatagagtgtcacagtcccttcaccgtcaacacggatcgattttgtgatggctgtcgtgttaggttgatcgtaagtacaatcattttcccattttgaacattcaaatcttcccaccaatttttaagtccgtgtttacctttcctacaattcttgcatgtgtaatttataggattggaacctagagtgcaaaactcttttatagtagaaatagcaacacataaaaaactagtgcacatctagatagaaattgaaatacgtttttataggtgcatggagccttaatttttataacaccaaattcaccccctgatagagtgtcacagtcccttcaccatcaacacggatcgattttgtgatggctgtcgtgttaggttgatcgtaagtacaatcattttcccattttgaacattcaaatcttcccaccaatttttaagtatttacctataatttctcttctatggcagcttcctgtagtggatgatttacctcttgcttgacgaagaaggtggttgggctgatggccatggcataaagggacccaacaaactcggcaccagtgatgatggcctgtagctggggagtaggaatataccctattattcccgaagagtctgagtgagaatccttgtggtagtagattgggtcaacaatgatttgcttttatgttcatacaaattttcagagagatcttttgctaaatctaattccatttggttgaagattactctttactttttatttatttaaattatttatgaaattagaccgaaacacatttcattttgtgttatgttccttgggattcatgtcagtctttggttttcatttcaaaatacacagatttcttccgaaatttgatgagaaaattctacagataattaaaaaatcgacgactacacaatttgtattagtgattggaatatcgtatgaacaaacatagtgacacaaagtgaatatgacttgtatgaatcaggcccacggagcataaatatctgcatatttgtctaactatccggttgctgtgacattgtgagctttttgaatttgccaactgatttgcgtaataagcttcttttaaagttatatgacgatttgcatattatctctagacaaattggaaggaaataaaggcttaaattatctgataatataattctatattttctcatgtcttcttgagaacgtagtacgcgaaaccaaataatagcaatatccaagatcctcatccgttgtcgtatcgctttactatttgtttgatgagcaggaatggatgagatcctggccgaactctgacagatagccgagaactgtcacattggcatgtcacggcatctgtacgtttgatatagggggcaggacttgcatgttgctttctcgagttacacgttatgagctatacatgttgctttctcgagttacacgttatgagctatagcctataactgaaatcgatcaataattacataattctgttgctcttttcttggctagttcactaatgcgatgggacatgaaatctgaaggtgaaatggatgacaccggtggacaaccagttgcgacgatatagtagctcgccagatatggaaaagtgaaaattcgacagattttattatagttaattcaacacgtgctcctgaggatgttgatccctgctacagagagctagctagactgaactagctacctagctcgaaaacataactagtcattgaaataacgacaaatgtttggttaaagtttgattaaataattttcatagactaaaaagctgttgtcatgcaaaaaattaccttgttctcaataattttttagcatggcctcttttatttgcaattgagcttgtatgtttttcacctagaaaattactgaacatggttattatacagttctaaggtaactctgaaccataagtctataaatagagctgtagcgtacatgtttttctatat

SEQ ID NO: 464 - DNA, 2250 bp, Setaria italica
  source 1..2250: mol_type = genomic DNA
gaggatcagtggaaagctttgctttccaataccttggtaaaaattgctgtgtcgcggtgccaggagtttaccttctcgatctcatttacattccacatttcatattgcactttacattccgtgtttacctttcctagaattcttgcatgtgtaatttataggattggaacctagagtgcaaaactcttttgtagtagaaatagcaacacataaaaaactagtgcacatctagatagaaattgaaatacgtttttataggtgcatggagccttaatttttataacaccaaattcaccccctgatagagtgtcacagtcccttcaccgtcaacacggatcgattttgtgatggctgtcgtgttaggttgatcgtaagtacaatcattttcccattttgaacattcaaatcttcccaccaatttttaagtccgtgtttacctttcctacaattcttgcatgtgtaatttataggattggaacctagagtgcaaaactcttttatagtagaaatagcaacacataaaaaactagtgcacatctagatagaaattgaaatacgtttttataggtgcatggagccttaatttttataacaccaaattcaccccctgatagagtgtcacagtcccttcaccatcaacacggatcgattttgtgatggctgtcgtgttaggttgatcgtaagtacaatcattttcccattttgaacattcaaatcttcccaccaatttttaagtatttacctataatttctcttctatggcagcttcctgtagtggatgatttacctcttgcttgacgaagaaggtggttgggctgatggccatggcataaagggacccaacaaactcggcaccagtgatgatggcctgtagctggggagtaggaatataccctattattcccgaagagtctgagtgagaatccttgtggtagtagattgggtcaacaatgatttgcttttatgttcatacaaattttcagagagatcttttgctaaatctaattccatttggttgaagattactctttactttttatttatttaaattatttatgaaattagaccgaaacacatttcattttgtgttatgttccttgggattcatgtcagtctttggttttcatttcaaaatacacagatttcttccgaaatttgatgagaaaattctacagataattaaaaaatcgacgactacacaatttgtattagtgattggaatatcgtatgaacaaacatagtgacacaaagtgaatatgacttgtatgaatcaggcccacggagcataaatatctgcatatttgtctaactatccggttgctgtgacattgtgagctttttgaatttgccaactgatttgcgtaataagcttcttttaaagttatatgacgatttgcatattatctctagacaaattggaaggaaataaaggcttaaattatctgataatataattctatattttctcatgtcttcttgagaacgtagtacgcgaaaccaaataatagcaatatccaagatcctcatccgttgtcgtatcgctttactatttgtttgatgagcaggaatggatgagatcctggccgaactctgacagatagccgagaactgtcacattggcatgtcacggcatctgtacgtttgatatagggggcaggacttgcatgttgctttctcgagttacacgttatgagctatacatgttgctttctcgagttacacgttatgagctatagcctataactgaaatcgatcaataattacataattctgttgctcttttcttggctagttcactaatgcgatgggacatgaaatctgaaggtgaaatggatgacaccggtggacaaccagttgcgacgatatagtagctcgccagatatggaaaagtgaaaattcgacagattttattatagttaattcaacacgtgctcctgaggatgttgatccctgctacagagagctagctagactgaactagctacctagctcgaaaacataactagtcattgaaataacgacaaatgtttggttaaagtttgattaaataattttcatagactaaaaagctgttgtcatgcaaaaaattaccttgttctcaataattttttagcatggcctcttttatttgcaattgagcttgtatgtttttcacctagaaaattactgaacatggttattatacagttctaaggtaactctgaaccataagtctataaatagagctgtagcgtacatgtttttctatat

SEQ ID NO: 465 - DNA, 1688 bp, Setaria italica
  source 1..1688: mol_type = genomic DNA
agcaaccattgtacactacgggaaatataatatgcataatggttgctctcccaccttcatgaggacagcctattggatgactcgcatcgggtgccatcaaagaacccatcaactactatattcatggactggaaggaaatgaggcaatcatctagctactacgtttttgggtgccttgatacaaagcgccttcatgctattatataggcacttaccataagtaccagtaaacaattaactcatacatctcgtagccaatgaactatgaatcagcagaaaatcattattttgtttgatcaactaaagcgcacgacctgtgacgtttggcacctagcccaagcattacaccgatatgtgatttaggtaatactcccacagtacattatgcataaccaacaccttaaattttgtacaatcagacttttcgtgatttgatcactatttgtataaacttatgtcactatcatgaaaacacctcagagatgcacattttcttggtacctgctcccattctactataacacctctccgtcccatccaagcagttggcctcttatttctttttggtgtatgtttctcagcctcgttcatggtgtctacctccatgcgaaacacgggttcagataagtgtgcaggtgcagtatctatgaaataaaggcagccaagttctcccagttcacaagagaaaatatcgtttataattatggtaataaaataatgtaggtctcaggacaaacaaccatatgtactcgcacatacaaatgtgattgcttcttgtaatcccaaattagtaatcgtcagtgcatgacttaaattagtaaacaattaactcatactccctccatcccacaaagagttattttaaaaaatttcagacagtatagtagtggtgagaaatgtatatgttgcccctaataactaatactagttgtcattaaaaatcatgcggtgtgtttagtttctcgatcctaaataaatgcacgcattgaaatcagagaaataacaccaattgattatttgattggctctacatacttctccatacttttttattattggtgtgagtgttgttttagttagatgagatttattaggaggtaaaggacactcttcgtgggacaaattgtagaatctaaaaggacactctttgcgggatgtagggagtatatctcatagacaatgaactatatgaatcagcagtaaccattgtttgatcaactaaagcatgacctatcatataaggctaatttaaattctgatcaatcagacatttcatgatttgactatttgtatttctaattctggagagtggatataagaaactatgtcactattatgaaaacaccctgagagatgcacattttctagatacctactcccactctactatgacacctctccatgccctccaagcagctggcctctaatttctcctggatgtaaggtttcttagcctcattcgtggtgtctctgtccacgcgaaacatgcgtgtgcagatacatgtacagatgcactatcgctttcctgacatagagtcctgatccgtccatagaaccatctctgtcctcgtggtccacgggaggatagctaaggccttattaattaacggtagcttactgatagtagctaagaaacacactatataataaccttcgtcaagaatgcagaacccatctaagcaaagcgc

SEQ ID NO: 466 - DNA, 1684 bp, Setaria italica
  source 1..1684: mol_type = genomic DNA
agcaaccattgtacactacgggaaatataatatgcataatggttgctctcccaccttcatgaggacagcctattggatgactcgcatcgggtgccatcaaagaacccatcaactactatattcatggactggaaggaaatgaggcaatcatctagctactacgtttttgggtgccttgatacaaagcgccttcatgctattatataggcacttaccataagtaccagtaaacaattaactcatacatctcgtagccaatgaactatgaatcagcagaaaatcattattttgtttgatcaactaaagcgcacgacctgtgacgtttggcacctagcccaagcattacaccgatatgtgatttaggtaatactcccacagtacattatgcataaccaacaccttaaattttgtacaatcagacttttcgtgatttgatcactatttgtataaacttatgtcactatcatgaaaacacctcagagatgcacattttcttggtacctgctcccattctactataacacctctccgtcccatccaagcagttggcctcttatttctttttggtgtatgtttctcagcctcgttcatggtgtctacctccatgcgaaacacgggttcagataagtgtgcaggtgcagtatctatgaaataaaggcagccaagttctcccagttcacaagagaaaatatcgtttataattatggtaataaaataatgtaggtctcaggacaaacaaccatatgtactcgcacatacaaatgtgattgcttcttgtaatcccaaattagtaatcgtcagtgcatgacttaaattagtaaacaattaactcatactccctccatcccacaaagagttattttaaaaaatttcagacagtatagtagtggtgagaaatgtatatgttgcccctaataactaatactagttgtcattaaaaatcatgcggtgtgtttagtttctcgatcctaaataaatgcacgcattgaaatcagagaaataacaccaattgattatttgattggctctacatacttctccatacttttttattattggtgtgagtgttgttttagttagatgagatttattaggaggtaaaggacactcttcgtgggacaaattgtagaatctaaaaggacactctttgcgggatgtagggagtatatctcatagacaatgaactatatgaatcagcagtaaccattgtttgatcaactaaagcatgacctatcatataaggctaatttaaattctgatcaatcagacatttcatgatttgactatttgtatttctaattctggagagtggatataagaaactatgtcactattatgaaaacaccctgagagatgcacattttctagatacctactcccactctactatgacacctctccatgccctccaagcagctggcctctaatttctcctggatgtaaggtttcttagcctcattcgtggtgtctctgtccacgcgaaacatgcgtgtgcagatacatgtacagatgcactatcgctttcctgacatagagtcctgatccgtccatagaaccatctctgtcctcgtggtccacgggaggatagctaaggccttattaattaacggtagcttactgatagtagctaagaaacacactatataataaccttcgtcaagaatgcagaacccatctaagcaaa

SEQ ID NO: 467 - DNA, 1434 bp, Setaria italica
  source 1..1434: mol_type = genomic DNA
gcgcagagtcacggcgtactagtcagctgccgagaggatggatgggatcatcgatcatgccaggatcgtcgtcgtttccttgacagtttttgaccttttgcgtcatgccgccccgagtcgtcaccattgcttgtgtctccttacgtggaaaattccatgaaccggccgaatagctttgtcgcaactgagctgaaaaaggagactgaaaatgatacaagtacttgatgtttggtgcgagatagacatcaccttttgaacggatcaattagtagtttgcagcgcaaacagacgattgaaaatgcaagcctgccagctgcactgatgggaaaagggcatcctaattcctgttcaaataaagggcatgattagcgggatactactacccatcatcttgtgcaaatttcttgagatgcttgtactgtttctgactgccgttggcgtctgacagcgagatgctgtgtgctgcagcagcaactctacggtgatattttccgtcgccatgcagtttttttcccgtgtggtaacaaaatacaagatttcctgtcgtcgccatacacttcaaaggtctagaaattaataaagcgaactctattttggaatgtttcgatgggactataacgattttctgaacgtctccagtactgatggttctaactgtcaaaattaaacttgtcgctttatcaatgtcttgactgccggtaactgacagatagtaacctatgcaagctttagtcaagaaacggagataagcacaactcagccacttgcacatcgcaatcactcggatcagttatagacctttctcacaggatttcaaccccagacaaattttgcatggctggcatggttgcattgcaggctaacaaccacgtgttgagtggagaaattgatgagatgccttcaggcttccttattctgaatattacatgtttttgtgctcttgtatctccttacctaatcgaacagaaaaggtgcagcaggagagccaaattctggtttgcgccaacaagaaagagagagagccagaatttgacaggcatgcttgattattctatattaaatcttatctggcatgcttgacaggaccagcaaatgttaaaaagatatgaaccgtacattgaagattgtgatgtctctaaaacatacagtatatgtcctccctagcctgcaagcactcgttcgtttaccattataatttggagactcgaaccatcttcatatgatgcatgacaaactaaccactcattactgatcgccaacaaacatgcatgcagctcacaccgctagcaaacagcaagacatgttaccaacagactgtcacgggcgcaaaaatgatcaaacgtgcaggctactatatatacgcaatatgcaatgcatgatattcaggccatcgatcgcaaacacttgaaaaggattgtagtagtgctactagtc

SEQ ID NO: 468 - DNA, 1487 bp, Setaria italica
  source 1..1487: mol_type = genomic DNA
acctacgcgcagagtcacggcgtactagtcagctgccgagaggatggatgggatcatcgatcatgccaggatcgtcgtcgtttccttgacagtttttgaccttttgcgtcatgccgccccgagtcgtcaccattgcttgtgtctccttacgtggaaaattccatgaaccggccgaatagctttgtcgcaactgagctgaaaaaggagactgaaaatgatacaagtacttgatgtttggtgcgagatagacatcaccttttgaacggatcaattagtagtttgcagcgcaaacagacgattgaaaatgcaagcctgccagctgcactgatgggaaaagggcatcctaattcctgttcaaataaagggcatgattagcgggatactactacccatcatcttgtgcaaatttcttgagatgcttgtactgtttctgactgccgttggcgtctgacagcgagatgctgtgtgctgcagcagcaactctacggtgatattttccgtcgccatgcagtttttttcccgtgtggtaacaaaatacaagatttcctgtcgtcgccatacacttcaaaggtctagaaattaataaagcgaactctattttggaatgtttcgatgggactataacgattttctgaacgtctccagtactgatggttctaactgtcaaaattaaacttgtcgctttatcaatgtcttgactgccggtaactgacagatagtaacctatgcaagctttagtcaagaaacggagataagcacaactcagccacttgcacatcgcaatcactcggatcagttatagacctttctcacaggatttcaaccccagacaaattttgcatggctggcatggttgcattgcaggctaacaaccacgtgttgagtggagaaattgatgagatgccttcaggcttccttattctgaatattacatgtttttgtgctcttgtatctccttacctaatcgaacagaaaaggtgcagcaggagagccaaattctggtttgcgccaacaagaaagagagagagccagaatttgacaggcatgcttgattattctatattaaatcttatctggcatgcttgacaggaccagcaaatgttaaaaagatatgaaccgtacattgaagattgtgatgtctctaaaacatacagtatatgtcctccctagcctgcaagcactcgttcgtttaccattataatttggagactcgaaccatcttcatatgatgcatgacaaactaaccactcattactgatcgccaacaaacatgcatgcagctcacaccgctagcaaacagcaagacatgttaccaacagactgtcacgggcgcaaaaatgatcaaacgtgcaggctactatatatacgcaatatgcaatgcatgatattcaggccatcgatcgcaaacacttgaaaaggattgtagtagtgctactagtcatggcttcctccctgtcagtggtagtgctcatcctgtgcctaagggc

SEQ ID NO: 469 - DNA, 2713 bp, Setaria italica
  source 1..2713: mol_type = genomic DNA
gcaaactgctttgtctcctctaacgtcttatcatgttgagaaatccttaaacctagggataattgtgggctcatatcaaatatactcctaaaaggttaaggctatataaagaaacatgtacccatctattatgataaaagagaacaatttccacctccattatctcctgtgtgcttatcacaggtgacatgctgacaacgatgtgctatcttcccgctcagtgccaggaggcgacctgccctgtcctgcacgactgctgctccagaaagaacacctcgcctctcgttttaatttgccccgacttttttattagaagatgattggaagggaatgagaagaattgagtataaaataaactaattttctctccaatcccttctattacacttcaatctactatccacacaagtactgaacgaaggttgcagagcgccagtcatctcgcttgacatgccccccagttcgctggtatcaggtttctcaacacccgatgatagaggagtactagtagcgtgctagtcagctgtgactcgaggtcagcgctggacagagttcgtatgctcgtaataatttacgctgtagatgtagtggactacagttttcgtgcgctgatcagcctagcgtgacctcgccggagttcacccgtggcgcaccattggctcgccgtccttttccgatcgagcaccaaatctccgcacgcttacacaggccgatcggatcgggacggcccgccgctagctggtcggtatagtagaaccgcccgacgacgtcgccggaaaccagtggacaggacacacacatacagcgcacgccgccgcatatttttatcggcccgtggcaagaatgtaaaccgccacccttgtccggcgctgccagcactgacacaggggatgcatcggggatgaccggggcccgtgacggcgacgcgagccgcccggctcttcacagccacaagggcgcaggtggcagcgccggattggtcggccgccgctcctcgtgtagtcgcgtgtactcgaggccagcgatctggaggccgccgttgagccaggtgtcgcctccgcaggatgcgtatgggcgtggaatgcgtacgtatgttgcgtaggaaaaaaaaggaggttcttcttcttcttacacagcagaggacgaaagactgattcggttcggtactgtgacctttgtggaaatggcggtcagggcaggcgaacgttccgtaaccctccgcttcgttgtcatgcttgtcttcgtcagggggagtgacctgggctggtctcttagctcatcatccggtaaagcgcggactcacagccaatgctaaggacaaacggacaataccgacccttcaattaggtcatgtggatgagtcattgggggaagggatcaggcaatgagaagagaacaaaatcacacaactcgatcagcaggacaactcacacgaacaaattaaagcaaaagccctgatcatgcaaagtactctaatcccaatgatcatctacaagtcttgtggagagttcgtggtcccagaagggtacaggattaggttaggggcgggcgattacatgacgcttgggaacgacagaggacatggcaagctgggctagaaacctctggagttttctttcagaaagaggggcgatgcatggaggaggacagctaatgccgtcgcgctcatccagcttgtagctaggttgcaactaatcgtgccccgcgataagaatctctatttgtacgtagacagggctcgctgcctggctgtgcgtgatgcatgcgacgcaatgattcgctgtccctgttgttcattattggctatcaagtttctgagcatctccattggcggataagtactactccaaattttctttttccagaagataacgctgccgaactgtttagttagtatatccacaccgtattctttgtcatgagctgaataaatgtccatgccaaatgtgtgcctcattttccaactggcaattggcagttggatatgtagcaagcaagggcatgctgacttcagtttagaaacttctggtgacgagtattctttttttggtttaaagaaacaagaagccctgattagttgcttgaagacgatgacagccatgctgacagcgcatgcgaagcagtgcaatagcacagggaatgcatgcactctggcaatattctgggttgcttgtttctagctacctgcaaataagtgttcgctactgcttcacgctccatgatgactcgtaacctcatgcatccaccctagctaattcttctgtcaacttcctagccacaccttagggtggtaatgtaccgccacgaaattaagctggaccactgattacaagcaccagtgtggttttgtgctttcagacgtcaggctagctcttaattcgcttaatttttttttcagaacgtatagtacgtaagcacagaacctatagaatataagctgaatagcccctccgattgatcactggccaccagtttggcttcggcgtgacataatggtgagggcttagtcggttgtgggcggcaaaaattataacccaaaaccctgtaaccagaaatggaacccttatccctcactaataatgtaatcaatcagtagtcgctaagcaagccatcattgaggcgatgagctcgccctctcccctgcacgagccgtcgacctcccgcgccccatatatacctcgcctctcccgtcccctcacacaccactctagct

SEQ ID NO: 470 - DNA, 2781 bp, Setaria italica
  source 1..2781: mol_type = genomic DNA
gcaaactgctttgtctcctctaacgtcttatcatgttgagaaatccttaaacctagggataattgtgggctcatatcaaatatactcctaaaaggttaaggctatataaagaaacatgtacccatctattatgataaaagagaacaatttccacctccattatctcctgtgtgcttatcacaggtgacatgctgacaacgatgtgctatcttcccgctcagtgccaggaggcgacctgccctgtcctgcacgactgctgctccagaaagaacacctcgcctctcgttttaatttgccccgacttttttattagaagatgattggaagggaatgagaagaattgagtataaaataaactaattttctctccaatcccttctattacacttcaatctactatccacacaagtactgaacgaaggttgcagagcgccagtcatctcgcttgacatgccccccagttcgctggtatcaggtttctcaacacccgatgatagaggagtactagtagcgtgctagtcagctgtgactcgaggtcagcgctggacagagttcgtatgctcgtaataatttacgctgtagatgtagtggactacagttttcgtgcgctgatcagcctagcgtgacctcgccggagttcacccgtggcgcaccattggctcgccgtccttttccgatcgagcaccaaatctccgcacgcttacacaggccgatcggatcgggacggcccgccgctagctggtcggtatagtagaaccgcccgacgacgtcgccggaaaccagtggacaggacacacacatacagcgcacgccgccgcatatttttatcggcccgtggcaagaatgtaaaccgccacccttgtccggcgctgccagcactgacacaggggatgcatcggggatgaccggggcccgtgacggcgacgcgagccgcccggctcttcacagccacaagggcgcaggtggcagcgccggattggtcggccgccgctcctcgtgtagtcgcgtgtactcgaggccagcgatctggaggccgccgttgagccaggtgtcgcctccgcaggatgcgtatgggcgtggaatgcgtacgtatgttgcgtaggaaaaaaaaggaggttcttcttcttcttacacagcagaggacgaaagactgattcggttcggtactgtgacctttgtggaaatggcggtcagggcaggcgaacgttccgtaaccctccgcttcgttgtcatgcttgtcttcgtcagggggagtgacctgggctggtctcttagctcatcatccggtaaagcgcggactcacagccaatgctaaggacaaacggacaataccgacccttcaattaggtcatgtggatgagtcattgggggaagggatcaggcaatgagaagagaacaaaatcacacaactcgatcagcaggacaactcacacgaacaaattaaagcaaaagccctgatcatgcaaagtactctaatcccaatgatcatctacaagtcttgtggagagttcgtggtcccagaagggtacaggattaggttaggggcgggcgattacatgacgcttgggaacgacagaggacatggcaagctgggctagaaacctctggagttttctttcagaaagaggggcgatgcatggaggaggacagctaatgccgtcgcgctcatccagcttgtagctaggttgcaactaatcgtgccccgcgataagaatctctatttgtacgtagacagggctcgctgcctggctgtgcgtgatgcatgcgacgcaatgattcgctgtccctgttgttcattattggctatcaagtttctgagcatctccattggcggataagtactactccaaattttctttttccagaagataacgctgccgaactgtttagttagtatatccacaccgtattctttgtcatgagctgaataaatgtccatgccaaatgtgtgcctcattttccaactggcaattggcagttggatatgtagcaagcaagggcatgctgacttcagtttagaaacttctggtgacgagtattctttttttggtttaaagaaacaagaagccctgattagttgcttgaagacgatgacagccatgctgacagcgcatgcgaagcagtgcaatagcacagggaatgcatgcactctggcaatattctgggttgcttgtttctagctacctgcaaataagtgttcgctactgcttcacgctccatgatgactcgtaacctcatgcatccaccctagctaattcttctgtcaacttcctagccacaccttagggtggtaatgtaccgccacgaaattaagctggaccactgattacaagcaccagtgtggttttgtgctttcagacgtcaggctagctcttaattcgcttaatttttttttcagaacgtatagtacgtaagcacagaacctatagaatataagctgaatagcccctccgattgatcactggccaccagtttggcttcggcgtgacataatggtgagggcttagtcggttgtgggcggcaaaaattataacccaaaaccctgtaaccagaaatggaacccttatccctcactaataatgtaatcaatcagtagtcgctaagcaagccatcattgaggcgatgagctcgccctctcccctgcacgagccgtcgacctcccgcgccccatatatacctcgcctctcccgtcccctcacacaccactctagctagctgtgcacaaagcaagcgcgctcatagcctgagccctgagctgagcaagctaaggtactgatcggc

SEQ ID NO: 471 - DNA, 2810 bp, Setaria italica
  source 1..2810: mol_type = genomic DNA
ctgacaccaggctttccaaattccaaaccggcaaactgctttgtctcctctaacgtcttatcatgttgagaaatccttaaacctagggataattgtgggctcatatcaaatatactcctaaaaggttaaggctatataaagaaacatgtacccatctattatgataaaagagaacaatttccacctccattatctcctgtgtgcttatcacaggtgacatgctgacaacgatgtgctatcttcccgctcagtgccaggaggcgacctgccctgtcctgcacgactgctgctccagaaagaacacctcgcctctcgttttaatttgccccgacttttttattagaagatgattggaagggaatgagaagaattgagtataaaataaactaattttctctccaatcccttctattacacttcaatctactatccacacaagtactgaacgaaggttgcagagcgccagtcatctcgcttgacatgccccccagttcgctggtatcaggtttctcaacacccgatgatagaggagtactagtagcgtgctagtcagctgtgactcgaggtcagcgctggacagagttcgtatgctcgtaataatttacgctgtagatgtagtggactacagttttcgtgcgctgatcagcctagcgtgacctcgccggagttcacccgtggcgcaccattggctcgccgtccttttccgatcgagcaccaaatctccgcacgcttacacaggccgatcggatcgggacggcccgccgctagctggtcggtatagtagaaccgcccgacgacgtcgccggaaaccagtggacaggacacacacatacagcgcacgccgccgcatatttttatcggcccgtggcaagaatgtaaaccgccacccttgtccggcgctgccagcactgacacaggggatgcatcggggatgaccggggcccgtgacggcgacgcgagccgcccggctcttcacagccacaagggcgcaggtggcagcgccggattggtcggccgccgctcctcgtgtagtcgcgtgtactcgaggccagcgatctggaggccgccgttgagccaggtgtcgcctccgcaggatgcgtatgggcgtggaatgcgtacgtatgttgcgtaggaaaaaaaaggaggttcttcttcttcttacacagcagaggacgaaagactgattcggttcggtactgtgacctttgtggaaatggcggtcagggcaggcgaacgttccgtaaccctccgcttcgttgtcatgcttgtcttcgtcagggggagtgacctgggctggtctcttagctcatcatccggtaaagcgcggactcacagccaatgctaaggacaaacggacaataccgacccttcaattaggtcatgtggatgagtcattgggggaagggatcaggcaatgagaagagaacaaaatcacacaactcgatcagcaggacaactcacacgaacaaattaaagcaaaagccctgatcatgcaaagtactctaatcccaatgatcatctacaagtcttgtggagagttcgtggtcccagaagggtacaggattaggttaggggcgggcgattacatgacgcttgggaacgacagaggacatggcaagctgggctagaaacctctggagttttctttcagaaagaggggcgatgcatggaggaggacagctaatgccgtcgcgctcatccagcttgtagctaggttgcaactaatcgtgccccgcgataagaatctctatttgtacgtagacagggctcgctgcctggctgtgcgtgatgcatgcgacgcaatgattcgctgtccctgttgttcattattggctatcaagtttctgagcatctccattggcggataagtactactccaaattttctttttccagaagataacgctgccgaactgtttagttagtatatccacaccgtattctttgtcatgagctgaataaatgtccatgccaaatgtgtgcctcattttccaactggcaattggcagttggatatgtagcaagcaagggcatgctgacttcagtttagaaacttctggtgacgagtattctttttttggtttaaagaaacaagaagccctgattagttgcttgaagacgatgacagccatgctgacagcgcatgcgaagcagtgcaatagcacagggaatgcatgcactctggcaatattctgggttgcttgtttctagctacctgcaaataagtgttcgctactgcttcacgctccatgatgactcgtaacctcatgcatccaccctagctaattcttctgtcaacttcctagccacaccttagggtggtaatgtaccgccacgaaattaagctggaccactgattacaagcaccagtgtggttttgtgctttcagacgtcaggctagctcttaattcgcttaatttttttttcagaacgtatagtacgtaagcacagaacctatagaatataagctgaatagcccctccgattgatcactggccaccagtttggcttcggcgtgacataatggtgagggcttagtcggttgtgggcggcaaaaattataacccaaaaccctgtaaccagaaatggaacccttatccctcactaataatgtaatcaatcagtagtcgctaagcaagccatcattgaggcgatgagctcgccctctcccctgcacgagccgtcgacctcccgcgccccatatatacctcgcctctcccgtcccctcacacaccactctagctagctgtgcacaaagcaagcgcgctcatagcctgagccctgagctgagcaagctaaggtactgatcgg

SEQ ID NO: 472 - DNA, 2383 bp, Setaria italica
  source 1..2383: mol_type = genomic DNA
atccacacaagtactgaacgaaggttgcagagcgccagtcatctcgcttgacatgccccccagttcgctggtatcaggtttctcaacacccgatgatagaggagtactagtagcgtgctagtcagctgtgactcgaggtcagcgctggacagagttcgtatgctcgtaataatttacgctgtagatgtagtggactacagttttcgtgcgctgatcagcctagcgtgacctcgccggagttcacccgtggcgcaccattggctcgccgtccttttccgatcgagcaccaaatctccgcacgcttacacaggccgatcggatcgggacggcccgccgctagctggtcggtatagtagaaccgcccgacgacgtcgccggaaaccagtggacaggacacacacatacagcgcacgccgccgcatatttttatcggcccgtggcaagaatgtaaaccgccacccttgtccggcgctgccagcactgacacaggggatgcatcggggatgaccggggcccgtgacggcgacgcgagccgcccggctcttcacagccacaagggcgcaggtggcagcgccggattggtcggccgccgctcctcgtgtagtcgcgtgtactcgaggccagcgatctggaggccgccgttgagccaggtgtcgcctccgcaggatgcgtatgggcgtggaatgcgtacgtatgttgcgtaggaaaaaaaaggaggttcttcttcttcttacacagcagaggacgaaagactgattcggttcggtactgtgacctttgtggaaatggcggtcagggcaggcgaacgttccgtaaccctccgcttcgttgtcatgcttgtcttcgtcagggggagtgacctgggctggtctcttagctcatcatccggtaaagcgcggactcacagccaatgctaaggacaaacggacaataccgacccttcaattaggtcatgtggatgagtcattgggggaagggatcaggcaatgagaagagaacaaaatcacacaactcgatcagcaggacaactcacacgaacaaattaaagcaaaagccctgatcatgcaaagtactctaatcccaatgatcatctacaagtcttgtggagagttcgtggtcccagaagggtacaggattaggttaggggcgggcgattacatgacgcttgggaacgacagaggacatggcaagctgggctagaaacctctggagttttctttcagaaagaggggcgatgcatggaggaggacagctaatgccgtcgcgctcatccagcttgtagctaggttgcaactaatcgtgccccgcgataagaatctctatttgtacgtagacagggctcgctgcctggctgtgcgtgatgcatgcgacgcaatgattcgctgtccctgttgttcattattggctatcaagtttctgagcatctccattggcggataagtactactccaaattttctttttccagaagataacgctgccgaactgtttagttagtatatccacaccgtattctttgtcatgagctgaataaatgtccatgccaaatgtgtgcctcattttccaactggcaattggcagttggatatgtagcaagcaagggcatgctgacttcagtttagaaacttctggtgacgagtattctttttttggtttaaagaaacaagaagccctgattagttgcttgaagacgatgacagccatgctgacagcgcatgcgaagcagtgcaatagcacagggaatgcatgcactctggcaatattctgggttgcttgtttctagctacctgcaaataagtgttcgctactgcttcacgctccatgatgactcgtaacctcatgcatccaccctagctaattcttctgtcaacttcctagccacaccttagggtggtaatgtaccgccacgaaattaagctggaccactgattacaagcaccagtgtggttttgtgctttcagacgtcaggctagctcttaattcgcttaatttttttttcagaacgtatagtacgtaagcacagaacctatagaatataagctgaatagcccctccgattgatcactggccaccagtttggcttcggcgtgacataatggtgagggcttagtcggttgtgggcggcaaaaattataacccaaaaccctgtaaccagaaatggaacccttatccctcactaataatgtaatcaatcagtagtcgctaagcaagccatcattgaggcgatgagctcgccctctcccctgcacgagccgtcgacctcccgcgccccatatatacctcgcctctcccgtcccctcacacaccactctagctagctgtgcacaaagcaagcgcgctcatagcctgagccctgagctgagcaagctaaggtactgatcggc

SEQ ID NO: 473 - DNA, 987 bp, Setaria italica
  source 1..987: mol_type = genomic DNA
ctccaaatacagtgctcgttgcaacttgccccagacggccagacttgcggtttggatgattcaggaaagagccacgatataatgacctcatgacagggcgtaatacgctgtgctgcaacaaatttgtaccacgccgttttggtttcaaagaaatgagggatacagccaacgctggcgcacgatacgacatttaggttgcacctaatcaggcacctgataacgatcttaattagcagccagcaagtggttctcggatgtgcctctacgtggtgcttgcctgtccacgctatcattggcaagccaaattgctgattgagtagctctccattggtggagaggggcactccgttgccaggcaaccgatattattttaattaaaaaatcgattttttttgcaggcgcattgtgattatccagtaacaaagtacagcctccatccagcagttggaaacagagggatctagaaactccttggttccgagaaagagaattcgcatggccgttaagcacagaattcgctggtctgtgcggcaagcatagcaactgcatgcatagccacggttcacctcatcgttcaggcgttcacaccgtgcatcatcgttcaccagcccattctcagaagcagacagaaacacacgcatcacaattcacatcgctaatcgtcgctgaatgaagcttagccactgattaaaattagccagcctccccgtattaggcagagccaccggttgggctctagaattatctaacgatgatgagcgctttagtcggtcgcggtcggcaaaattataacccagaagcctccacagccagacgctccgctccgggggggcttatccctgacgaagaaaatcactaaacaatccaatcatgaagaagcagccgcctgttcctgtcacgaaccaccaccgtctctgcttctcactctcactcccggccccttaaatacctcgcctcgcctcggctgcctcgtcacagagctagcta

SEQ ID NO: 474 - DNA, 1501 bp, Setaria italica
  source 1..1501: mol_type = genomic DNA
tccagatcatttcaaccatgaaggcttataaattatgctgagtgccagcgtcatttcgtgattgctctatccttgtttcctttcgcttatagtaatctgatggtcgtagtgcacccaggtgtcgacctggcacgagcttttcatgactagagaatagagatgtgtgcctctcgttacaggtgagctctgaacaggatagcaaaagtaaaacgagtgaagctccagcttcaattcctgtgatggaatctcgtggaagatttgggacgagatcattgggcgctccctccccctttctgtctcgtgctgttgctgtcttcatccacgaaaagcgtctccagctgctctgttcaccacagcagcatgacaacggcagccactgatgagccctgcagacggttctaggcttctagctccgcggttggaggctcatttcactccgtgatctgaactcgcgctgcgtgcagtttcttgacaaaacttgctgtgacctgatgaaaagcaaggggaaaaggctctccaaatacagtgctcgttgcaacttgccccagacggccagacttgcggtttggatgattcaggaaagagccacgatataatgacctcatgacagggcgtaatacgctgtgctgcaacaaatttgtaccacgccgttttggtttcaaagaaatgagggatacagccaacgctggcgcacgatacgacatttaggttgcacctaatcaggcacctgataacgatcttaattagcagccagcaagtggttctcggatgtgcctctacgtggtgcttgcctgtccacgctatcattggcaagccaaattgctgattgagtagctctccattggtggagaggggcactccgttgccaggcaaccgatattattttaattaaaaaatcgattttttttgcaggcgcattgtgattatccagtaacaaagtacagcctccatccagcagttggaaacagagggatctagaaactccttggttccgagaaagagaattcgcatggccgttaagcacagaattcgctggtctgtgcggcaagcatagcaactgcatgcatagccacggttcacctcatcgttcaggcgttcacaccgtgcatcatcgttcaccagcccattctcagaagcagacagaaacacacgcatcacaattcacatcgctaatcgtcgctgaatgaagcttagccactgattaaaattagccagcctccccgtattaggcagagccaccggttgggctctagaattatctaacgatgatgagcgctttagtcggtcgcggtcggcaaaattataacccagaagcctccacagccagacgctccgctccgggggggcttatccctgacgaagaaaatcactaaacaatccaatcatgaagaagcagccgcctgttcctgtcacgaaccaccaccgtctctgcttctcactctcactcccggccccttaaatacctcgcctcgcctcggctgcctcgtcacagagctagcta

SEQ ID NO: 475 - DNA, 1498 bp, Setaria italica
  source 1..1498: mol_type = genomic DNA
tccagatcatttcaaccatgaaggcttataaattatgctgagtgccagcgtcatttcgtgattgctctatccttgtttcctttcgcttatagtaatctgatggtcgtagtgcacccaggtgtcgacctggcacgagcttttcatgactagagaatagagatgtgtgcctctcgttacaggtgagctctgaacaggatagcaaaagtaaaacgagtgaagctccagcttcaattcctgtgatggaatctcgtggaagatttgggacgagatcattgggcgctccctccccctttctgtctcgtgctgttgctgtcttcatccacgaaaagcgtctccagctgctctgttcaccacagcagcatgacaacggcagccactgatgagccctgcagacggttctaggcttctagctccgcggttggaggctcatttcactccgtgatctgaactcgcgctgcgtgcagtttcttgacaaaacttgctgtgacctgatgaaaagcaaggggaaaaggctctccaaatacagtgctcgttgcaacttgccccagacggccagacttgcggtttggatgattcaggaaagagccacgatataatgacctcatgacagggcgtaatacgctgtgctgcaacaaatttgtaccacgccgttttggtttcaaagaaatgagggatacagccaacgctggcgcacgatacgacatttaggttgcacctaatcaggcacctgataacgatcttaattagcagccagcaagtggttctcggatgtgcctctacgtggtgcttgcctgtccacgctatcattggcaagccaaattgctgattgagtagctctccattggtggagaggggcactccgttgccaggcaaccgatattattttaattaaaaaatcgattttttttgcaggcgcattgtgattatccagtaacaaagtacagcctccatccagcagttggaaacagagggatctagaaactccttggttccgagaaagagaattcgcatggccgttaagcacagaattcgctggtctgtgcggcaagcatagcaactgcatgcatagccacggttcacctcatcgttcaggcgttcacaccgtgcatcatcgttcaccagcccattctcagaagcagacagaaacacacgcatcacaattcacatcgctaatcgtcgctgaatgaagcttagccactgattaaaattagccagcctccccgtattaggcagagccaccggttgggctctagaattatctaacgatgatgagcgctttagtcggtcgcggtcggcaaaattataacccagaagcctccacagccagacgctccgctccgggggggcttatccctgacgaagaaaatcactaaacaatccaatcatgaagaagcagccgcctgttcctgtcacgaaccaccaccgtctctgcttctcactctcactcccggccccttaaatacctcgcctcgcctcggctgcctcgtcacagagctag

SEQ ID NO: 476 - DNA, 2197 bp, Setaria italica
  source 1..2197: mol_type = genomic DNA
actcctatctactgctctatttttctaagtgaatgaaaaatctccaaacctttatttgaccagctgtttttttttcacatttccctgcaactattacattcggctattcattaacgcatacagcgtatgtttcacattaacatgtgcagaaacgctggggaccacggggtggaagttcaatgcctgggctgctgtaatttgcttactagcctatcttttgaactagcctggaactatacttcgatcacacaagcagtgcatgggatgttattcaccagcccattttttgttagattttggctggttactgatatcctttgctgtcttgcacctgttctgaagtgctgttatccgttgctcattaaattgaaaatgtggaaactcattggacgcaagtttgcaatttgtatactgtgtgtccgagagctgctctgttggcacgcaattcttttaacatctattttttttcccttactggctggtttcttcttggatgggaaactgtagacgttgggcagcgtgcgatgctgcaatactcatcaggatccggttgtctgtatgcatatgcacaaccaaattctctccttgtgtgatcaaaatgagctgaagaagagaatctgttgtgcggcattgacgaagagctcagtcagttgcagaaatccatcaaaccaaccggcgtgattaggacccgagccgtccagatcatttcaaccatgaaggcttataaattatgctgagtgccagcgtcatttcgtgattgctctatccttgtttcctttcgcttatagtaatctgatggtcgtagtgcacccaggtgtcgacctggcacgagcttttcatgactagagaatagagatgtgtgcctctcgttacaggtgagctctgaacaggatagcaaaagtaaaacgagtgaagctccagcttcaattcctgtgatggaatctcgtggaagatttgggacgagatcattgggcgctccctccccctttctgtctcgtgctgttgctgtcttcatccacgaaaagcgtctccagctgctctgttcaccacagcagcatgacaacggcagccactgatgagccctgcagacggttctaggcttctagctccgcggttggaggctcatttcactccgtgatctgaactcgcgctgcgtgcagtttcttgacaaaacttgctgtgacctgatgaaaagcaaggggaaaaggctctccaaatacagtgctcgttgcaacttgccccagacggccagacttgcggtttggatgattcaggaaagagccacgatataatgacctcatgacagggcgtaatacgctgtgctgcaacaaatttgtaccacgccgttttggtttcaaagaaatgagggatacagccaacgctggcgcacgatacgacatttaggttgcacctaatcaggcacctgataacgatcttaattagcagccagcaagtggttctcggatgtgcctctacgtggtgcttgcctgtccacgctatcattggcaagccaaattgctgattgagtagctctccattggtggagaggggcactccgttgccaggcaaccgatattattttaattaaaaaatcgattttttttgcaggcgcattgtgattatccagtaacaaagtacagcctccatccagcagttggaaacagagggatctagaaactccttggttccgagaaagagaattcgcatggccgttaagcacagaattcgctggtctgtgcggcaagcatagcaactgcatgcatagccacggttcacctcatcgttcaggcgttcacaccgtgcatcatcgttcaccagcccattctcagaagcagacagaaacacacgcatcacaattcacatcgctaatcgtcgctgaatgaagcttagccactgattaaaattagccagcctccccgtattaggcagagccaccggttgggctctagaattatctaacgatgatgagcgctttagtcggtcgcggtcggcaaaattataacccagaagcctccacagccagacgctccgctccgggggggcttatccctgacgaagaaaatcactaaacaatccaatcatgaagaagcagccgcctgttcctgtcacgaaccaccaccgtctctgcttctcactctcactcccggccccttaaatacctcgcctcgcctcggctgcctcgtcacagagctagcta

SEQ ID NO: 477 - DNA, 654 bp, Setaria italica; identical to SEQ ID NO: 79
  source 1..654: mol_type = genomic DNA

SEQ ID NO: 478 - DNA, 2722 bp, Setaria italica
  source 1..2722: mol_type = genomic DNA
ccatctctccttgaaagagaactatgtttaagtttcaacaagagacaacaatgcccttgtgaactgacaaaagagataacaggaaaagacaaggattcgaggaagcaagaaggcaagtgagcagtgaattgcagtactaccgaacaagactgatttttagtacagtacctaattattttggaataatgaataagagaggataatgttggacgaataaaaattgtgaacggaaaataactagatatgttttgggaggcactaacaagactttaatttggaagagagatacaaacatataaacatgttagtggatagataatatggtgtcttatgttagaaaagtacattattttttatggttattttcatagatctggaacattaatacaaaactaatcctatggatacaaaactgcatgaaaagtaatcatgaatttattctaatattgggcatcatatttaagtcacgttgcagaatttgaacttaaaactcgattcgtacgtggagaaaacaaaaaagatcaaatctcattagaggtatattggaccatttaaagtagtttgggggaataaatcgagcctaagttttatttaggggttaagaggacagataaagtagattggtgatggtagtaaaatggacattttcctagttgtatctggtatgtactatttggcttaacatatattaagtcccaagtagtgcaaattgggattcaaatactaaattctctttacgtagagatgaggaaggagaattacaaagcagcattgccacagccttgcttcagttttgctcgatgcaagcagggtggagtggtggacaggcatggactagcggcacggaagacaacatcatgcatgtgcttccagagttgccaacggcaaaagagcagcaatgtgtgtagttcggccatgggctcggtcacaggtgggttcgtctcccagaacaggcaggagagggggtagctggctgagcatccatccgtgatgagcctaaaccgttgcgcaaacgggcagctggagagataatgcgaatatgtgatcctccacggcgttgccacagatgtcacggatcatgcatgcatgtcgtcatttagcagatgtttgagtctgatacacccttcacaccaagcaaattataaccaagataaggattcgaggaagcagaaggaggcaagtgagcagtgacaagtacgtccacaacacaatccagacgaaaacgaacacatcaatgccctcggcgccaatcgtagtaatgctgcaacaaacaaagtcctgtgaagacggtctctattaaatagccacacatggagccgatatataatccgaaagataatgtaataatagagaagcgtcatgttttttcaaaaataaaaataaaaataaactgggaacaagcccatcgcaaggccgggagcgagcttgcttttcagagtcagtgagccaccgggcgggagctgacgggtaggggaagaggaagacaacatcgtgcatgtgcttcaagagttgccaacggcaaaggagcagcagtgtgtgtagttcggctatgggctcagtcacaggtgggtttcgtctcccagaaccagcaggagagggggtttgtggctggctgtgcatccatccgtgatgagcctaaaccgttgcgcaaatggacacctggagcgataatgtgaatatgtgatcctccacggcgttgccacaaatgtcactgatcatccatgttgtcctatagcacatgcttgagtccaagtccctccacaccaagcaaattatagccaagacaaggattcaaggaagcaagaaggcgagtgagcagtgacaaagtatgtccacagcacaatccgtacgaaaacgagcgcatcagtgccctcagcgccaatcgtagtgtttccgcatcaaataagtcctgtgaagccggtctctattaaattgccacgtatgaagccgatgtgtggtccgaaagataatatgcaataatagagaagcgttatgttttccctgaaaaaaacctgggaacaagcctgtcgcaaggccgggagcctcgcttccgtcttgctttttcacagtcagtgagccaccgggcgggagctgacgggtaggggaagaggaagacagcaccgtgcatgtgcttccagagttgccaacggcaaatgagcagcagtgtgtgtagttcggccatgggctcggtcacaggtgggtttcgtctcccagaaccagcaggagagggggtatgtggctggctgtgcatccatccgtgatgagcctaaaccgttgcgcaaacggacacctagagcgataatgtatatgtgatcctccacggcgttgccacaaatgtcactgatcatgcatgttgtcctatatagcacatgcttgagtccaagtccctccacaccaagcaaattaattatagccaagagaaggattcgaggaagaagaaggcgattgagcagtgacaagtacgtcgacagcacaacccagacgaaaaccaggcaacgagcacatcgctccgcagcgctgcccctcggccctccccttgcattcgtgattcgccgccggtcacatgccctccgcttgaaaaaaaaaaagccccctttccatccgccatgaggcgtgcaatcccgtgcacacactcgccgactccccatccgttattttgttttttttagaagccccatccgttatttaaacccacccgcgcgcctcgctcgacctcgtgcca

SEQ ID NO: 479 - DNA, 2723 bp, Setaria italica
  source 1..2723: mol_type = genomic DNA
ccatctctccttgaaagagaactatgtttaagtttcaacaagagacaacaatgcccttgtgaactgacaaaagagataacaggaaaagacaaggattcgaggaagcaagaaggcaagtgagcagtgaattgcagtactaccgaacaagactgatttttagtacagtacctaattattttggaataatgaataagagaggataatgttggacgaataaaaattgtgaacggaaaataactagatatgttttgggaggcactaacaagactttaatttggaagagagatacaaacatataaacatgttagtggatagataatatggtgtcttatgttagaaaagtacattattttttatggttattttcatagatctggaacattaatacaaaactaatcctatggatacaaaactgcatgaaaagtaatcatgaatttattctaatattgggcatcatatttaagtcacgttgcagaatttgaacttaaaactcgattcgtacgtggagaaacaaaaaagatcaaatctcattagaggtatattggaccatttaaagtagtttgggggaataaatcgagcctaagttttatttaggggttaagaggacagataaagtagattggtgatggtagtaaaatggacattttcctagttgtatctggtatgtactatttggcttaacatatattaagtcccaagtagtgcaaattgggattcaaatactaaattctctttacgtagagatgaggaaggagaattacaaagcagcattgccacagccttgcttcagttttgctcgatgcaagcagggtggagtggtggacaggcatggactagcggcacggaagacaacatcatgcatgtgcttccagagttgccaacggcaaaagagcagcaatgtgtgtagttcggccatgggctcggtcacaggtgggttcgtctcccagaacaggcaggagagggggtagctggctgagcatccatccgtgatgagcctaaaccgttgcgcaaacgggcagctggagagataatgcgaatatgtgatcctccacggcgttgccacagatgtcacggatcatgcatgcatgtcgtcatttagcagatgtttgagtctgatacacccttcacaccaagcaaattataaccaagataaggattcgaggaagcagaaggaggcaagtgagcagtgacaagtacgtccacaacacaatccagacgaaaacgaacacatcaatgccctcggcgccaatcgtagtaatgctgcaacaaacaaagtcctgtgaagacggtctctattaaatagccacacatggagccgatatataatccgaaagataatgtaataatagagaagcgtcatgttttttcaaaaataaaaataaaaataaactgggaacaagcccatcgcaaggccgggagcgagcttgcttttcagagtcagtgagccaccgggcgggagctgacgggtaggggaagaggaagacaacatcgtgcatgtgcttcaagagttgccaacggcaaaggagcagcagtgtgtgtagttcggctatgggctcagtcacaggtgggtttcgtctcccagaaccagcaggagagggggtttgtggctggctgtgcatccatccgtgatgagcctaaaccgttgcgcaaatggacacctggagcgataatgtgaatatgtgatcctccacggcgttgccacaaatgtcactgatcatccatgttgtcctatagcacatgcttgagtccaagtccctccacaccaagcaaattatagccaagacaaggattcaaggaagcaagaaggcgagtgagcagtgacaaagtatgtccacagcacaatccgtacgaaaacgagcgcatcagtgccctcagcgccaatcgtagtgtttccgcatcaaataagtcctgtgaagccggtctctattaaattgccacgtatgaagccgatgtgtggtccgaaagataatatgcaataatagagaagcgttatgttttccctgaaaaaaacctgggaacaagcctgtcgcaaggccgggagcctcgcttccgtcttgctttttcacagtcagtgagccaccgggcgggagctgacgggtaggggaagaggaagacagcaccgtgcatgtgcttccagagttgccaacggcaaatgagcagcagtgtgtgtagttcggccatgggctcggtcacaggtgggtttcgtctcccagaaccagcaggagagggggtatgtggctggctgtgcatccatccgtgatgagcctaaaccgttgcgcaaacggacacctagagcgataatgtatatgtgatcctccacggcgttgccacaaatgtcactgatcatgcatgttgtcctatatagcacatgcttgagtccaagtccctccacaccaagcaaattaattatagccaagagaaggattcgaggaagaagaaggcgattgagcagtgacaagtacgtcgacagcacaacccagacgaaaaccaggcaacgagcacatcgctccgcagcgctgcccctcggccctccccttgcattcgtgattcgccgccggtcacatgccctccgcttgaaaaaaaaaaaagccccctttccatccgccatgaggcgtgcaatcccgtgcacacactcgccgactccccatccgttattttgttttttttagaagccccatccgttatttaaacccacccgcgcgcctcgctcgacctcgtgccac

SEQ ID NO: 480 - DNA, 2722 bp, Setaria italica
  source 1..2722: mol_type = genomic DNA
ccatctctccttgaaagagaactatgtttaagtttcaacaagagacaacaatgcccttgtgaactgacaaaagagataacaggaaaagacaaggattcgaggaagcaagaaggcaagtgagcagtgaattgcagtactaccgaacaagactgatttttagtacagtacctaattattttggaataatgaataagagaggataatgttggacgaataaaaattgtgaacggaaaataactagatatgttttgggaggcactaacaagactttaatttggaagagagatacaaacatataaacatgttagtggatagataatatggtgtcttatgttagaaaagtacattattttttatggttattttcatagatctggaacattaatacaaaactaatcctatggatacaaaactgcatgaaaagtaatcatgaatttattctaatattgggcatcatatttaagtcacgttgcagaatttgaacttaaaactcgattcgtacgtggagwaaacaaaaaagatcaaatctcattagaggtatattggaccatttaaagtagtttgggggaataaatcgagcctaagttttatttaggggttaagaggacagataaagtagattggtgatggtagtaaaatggacattttcctagttgtatctggtatgtactatttggcttaacatatattaagtcccaagtagtgcaaattgggattcaaatactaaattctctttacgtagagatgaggaaggagaattacaaagcagcattgccacagccttgcttcagttttgctcgatgcaagcagggtggagtggtggacaggcatggactagcggcacggaagacaacatcatgcatgtgcttccagagttgccaacggcaaaagagcagcaatgtgtgtagttcggccatgggctcggtcacaggtgggttcgtctcccagaacaggcaggagagggggtagctggctgagcatccatccgtgatgagcctaaaccgttgcgcaaacgggcagctggagagataatgcgaatatgtgatcctccacggcgttgccacagatgtcacggatcatgcatgcatgtcgtcatttagcagatgtttgagtctgatacacccttcacaccaagcaaattataaccaagataaggattcgaggaagcagaaggaggcaagtgagcagtgacaagtacgtccacaacacaatccagacgaaaacgaacacatcaatgccctcggcgccaatcgtagtaatgctgcaacaaacaaagtcctgtgaagacggtctctattaaatagccacacatggagccgatatataatccgaaagataatgtaataatagagaagcgtcatgttttttcaaaaataaaaataaaaataaactgggaacaagcccatcgcaaggccgggagcgagcttgcttttcagagtcagtgagccaccgggcgggagctgacgggtaggggaagaggaagacaacatcgtgcatgtgcttcaagagttgccaacggcaaaggagcagcagtgtgtgtagttcggctatgggctcagtcacaggtgggtttcgtctcccagaaccagcaggagagggggtttgtggctggctgtgcatccatccgtgatgagcctaaaccgttgcgcaaatggacacctggagcgataatgtgaatatgtgatcctccacggcgttgccacaaatgtcactgatcatccatgttgtcctatagcacatgcttgagtccaagtccctccacaccaagcaaattatagccaagacaaggattcaaggaagcaagaaggcgagtgagcagtgacaaagtatgtccacagcacaatccgtacgaaaacgagcgcatcagtgccctcagcgccaatcgtagtgtttccgcatcaaataagtcctgtgaagccggtctctattaaattgccacgtatgaagccgatgtgtggtccgaaagataatatgcaataatagagaagcgttatgttttccctgaaaaaaacctgggaacaagcctgtcgcaaggccgggagcctcgcttccgtcttgctttttcacagtcagtgagccaccgggcgggagctgacgggtaggggaagaggaagacagcaccgtgcatgtgcttccagagttgccaacggcaaatgagcagcagtgtgtgtagttcggccatgggctcggtcacaggtgggtttcgtctcccagaaccagcaggagagggggtatgtggctggctgtgcatccatccgtgatgagcctaaaccgttgcgcaaacggacacctagagcgataatgtatatgtgatcctccacggcgttgccacaaatgtcactgatcatgcatgttgtcctatatagcacatgcttgagtccaagtccctccacaccaagcaaattaattatagccaagagaaggattcgaggaagaagaaggcgattgagcagtgacaagtacgtcgacagcacaacccagacgaaaaccaggcaacgagcacatcgctccgcagcgctgcccctcggccctccccttgcattcgtgattcgccgccggtcacatgccctccgcttgaaaaaaaaaaagccccctttccatccgccatgaggcgtgcaatcccgtgcacacactcgccgactccccatccgttattttgttttttttagaagccccatccgttatttaaacccacccgcgcgcctcgctcgacctcgtgcca

SEQ ID NO: 481 - DNA, 1879 bp, Setaria italica
  source 1..1879: mol_type = genomic DNA
cacggaagacaacatcatgcatgtgcttccagagttgccaacggcaaaagagcagcaatgtgtgtagttcggccatgggctcggtcacaggtgggttcgtctcccagaacaggcaggagagggggtagctggctgagcatccatccgtgatgagcctaaaccgttgcgcaaacgggcagctggagagataatgcgaatatgtgatcctccacggcgttgccacagatgtcacggatcatgcatgcatgtcgtcatttagcagatgtttgagtctgatacacccttcacaccaagcaaattataaccaagataaggattcgaggaagcagaaggaggcaagtgagcagtgacaagtacgtccacaacacaatccagacgaaaacgaacacatcaatgccctcggcgccaatcgtagtaatgctgcaacaaacaaagtcctgtgaagacggtctctattaaatagccacacatggagccgatatataatccgaaagataatgtaataatagagaagcgtcatgttttttcaaaaataaaaataaaaataaactgggaacaagcccatcgcaaggccgggagcgagcttgcttttcagagtcagtgagccaccgggcgggagctgacgggtaggggaagaggaagacaacatcgtgcatgtgcttcaagagttgccaacggcaaaggagcagcagtgtgtgtagttcggctatgggctcagtcacaggtgggtttcgtctcccagaaccagcaggagagggggtttgtggctggctgtgcatccatccgtgatgagcctaaaccgttgcgcaaatggacacctggagcgataatgtgaatatgtgatcctccacggcgttgccacaaatgtcactgatcatccatgttgtcctatagcacatgcttgagtccaagtccctccacaccaagcaaattatagccaagacaaggattcaaggaagcaagaaggcgagtgagcagtgacaaagtatgtccacagcacaatccgtacgaaaacgagcgcatcagtgccctcagcgccaatcgtagtgtttccgcatcaaataagtcctgtgaagccggtctctattaaattgccacgtatgaagccgatgtgtggtccgaaagataatatgcaataatagagaagcgttatgttttccctgaaaaaaacctgggaacaagcctgtcgcaaggccgggagcctcgcttccgtcttgctttttcacagtcagtgagccaccgggcgggagctgacgggtaggggaagaggaagacagcaccgtgcatgtgcttccagagttgccaacggcaaatgagcagcagtgtgtgtagttcggccatgggctcggtcacaggtgggtttcgtctcccagaaccagcaggagagggggtatgtggctggctgtgcatccatccgtgatgagcctaaaccgttgcgcaaacggacacctagagcgataatgtatatgtgatcctccacggcgttgccacaaatgtcactgatcatgcatgttgtcctatatagcacatgcttgagtccaagtccctccacaccaagcaaattaattatagccaagagaaggattcgaggaagaagaaggcgattgagcagtgacaagtacgtcgacagcacaacccagacgaaaaccaggcaacgagcacatcgctccgcagcgctgcccctcggccctccccttgcattcgtgattcgccgccggtcacatgccctccgcttgaaaaaaaaaaaagccccctttccatccgccatgaggcgtgcaatcccgtgcacacactcgccgactccccatccgttattttgttttttttagaagccccatccgttatttaaacccacccgcgcgcctcgctcgacctcgtg

SEQ ID NO: 482 - DNA, 1761 bp, Setaria italica
  source 1..1761: mol_type = genomic DNA
aactgctactagcagcacaagcattctttatttttattaacaataatttctacaacatgtcattacaaatattttattcgcgagatgcgagggcacgccaaggcccggagtctcgaggaggacgacatcgtgagatgaatgcatatgtctccttgtgttgcaaggtcacgaatggaagtatacttgctagggctcatcttgttcttcgacgagtggacgaggactcgaggagtccagctgcggactgcttcggcagacggacaccacgaaggacgtaccctccttccaaccactggtctgttttatccaagatctgagatcaagacgaaacataactatggttgcagcttcaattctttgcaaccgctgagtgcaaaacattttatgctgatgtaataatttctatgagaaacgataattacgatgcttatgtgtgagcttgccatatgtgcaattaatgctttattttttaagaaaataatatcttttctatggcaattttatccccacaatattagcccgtagcaatgcacaggcactatccctgtacgtatataaacgactatagctaattgaaatggcggagtatgccttggacccaccttactgctagttgaatcggcgaaattttccttctctaagcagcacatcttaaaaaaatataggaactgtttggctgcacagcactgcagctacagctgctgctgccagcgttttagcctactgtagcggttgcagcaaggctgcatgctagcagcccgaaagtagcacagctaaacaggcccaaaactttttcatatgaattttagatccgaacattgtgtcgattatttgagtatcaagatggttccaaataaaaaaatatgaactacaaagttgtacaatgtttatataaagtttatatttgtctaagttcatatgaaaaagttatatattttttttaaaaaatgtgctgctcagagaaagagaattccaccgattcaactggcggtaaggtcataaattccgttgtttcggttagatagccaattcaaatgtctatatgagtatagatttgcaaacttttattagaacatatatttttacaaaacattaaaaatactttttacaaaacatatagatttgcaaacttttattagctggctgctgcagctgcagccagccgaaagcagcacagccgaacatgcccataactttttcatatgaatcttaatctgaacattgtgttgattatttgaatactaagatagtttcaaataaaaaagtatgaactaccaagttgtacaatatttatataaagtttatctctttttgtgtttgcattcgtatgaaaaagttatatttttttgaaaaaaatgtgctgctcaaagaactggcggtaaggtcataaattccgctgtttcggttggatagccaattcaaatgtctatatgagtacagatttgcaaatttttattagaacatatatttttgcaagacattaaaaataaaagacatataaaaacaaaacataatcaactttccttgaagccacaccactcgccgcagccgcgctctcaaatttcctggagccagaagcgtcggggtccggagccagacgggcggcagacgcggccgggaaggtggggccccacagggataaggtgcgatgggggcgcgtgtgaaccccgtcgcgccacctgacggtgcgccacaggtacggtactgtatattccaacctgccgttcgtctcccatttcccgcgaactcacttgcctcgcg

SEQ ID NO: 483 - DNA, 1682 bp, Setaria italica
  source 1..1682: mol_type = genomic DNA
taatgcatatggttagacttcatagcatgcgttatgtaattatggtgattagatctagtatgtcaacccttcatgatatataaacacgttcacctatgttcgtgcccgtaaactacctacaccgataggggggtcgtgacaaggtctgtttccgtgtagggtgggggttttcgggaggttgaccggaggtagtagtttaaagattgctttggatgagatgcatgatgtgtttgctcgttggctagaactacaactagaagatatagccaattacaactagaagatgataggctcttgctatccttggtggtcttataccatatatatctgtggatgtgatatacccttattcatgatatcaatctttataacaagtttgccttcatatacaatcaatgcatcatgttaggattgcaccgttagattagatggaagatcctagttagttcgctgccgatccacggattgataaacattagacgaatactctaagggaaaagctatgatgatccgtgcatttgcggttcacaaattgacgcgctaactgccgtcaacaaacttcaacaagtaacagtgggaaacaaatgcggtagaagtgaagcaggaagaagatcgaggctttctagcaagagttttctttgggagtgagtggagagcattgcatcgttctaggtttgtttgtggaaaagtgcatggaaatgtatcaaaccctgcaggatttgaattgacacttgttcagtagtcaaaggtggtcccactatcttgtaatatgtctcgtgattcaacatttgaaaacaagatatgtaactggatatttctccaaccattcaaaacaagcctcaccaaatagaactctggtagataacttgtctcacaaggcttaaggtaccaacaatggttcaaaattaaatgtgacagataagtcgtccgatacgagcatttttgtagcagtgatggatcctatgtaagtctacgatgaacctatatagtagcttgatatgctagctttggtatttacctctttaaacatgttcatgtaatgaacagtctattttattagctagactcgaaataaatctcgacaataacttgtaggaataatatcttatggtgttttgtactaaaagcactgactactaattaataatccaagcatcctaatttgttaaggaaagtccaaaatgttacatgtattctttatgaatgtagcacaaagtattctttatgaatgtagcacaaaggataagacatgatatgggtgagtcaaggccacctaggcaacaaacaatacagaaggtagagtattaaaaatgaccacccaagcttatgtggattagacgagccaaaattatcatgccagcgtcatccatatcaagataggaacaaaaaaaaccatgtcttatgatgtaatacctccatttttatttatatgtcattttggttaccaccacggacgtcaaacaaacaaaaatggaggtaataacaaaatcaattaaaacaaaaaggccatgtcttctgatgtagcaaaatgaattttataacttcagctggtatccaaatcgacaaatgacatgtcatgtccagattatgaggcatcctccaaaattcagttttgcaaaggccaaaatcctacatgcatggcttggctcctataaataccaccccaatcaatctctaaccca

SEQ ID NO: 484 - DNA, 1739 bp, Setaria italica
  source 1..1739: mol_type = genomic DNA
tactatagggcacgcgtggtcgacggcccgggctggtccatgccaaacatgaggatggcatgcaccgtaaagttgatgatgaacacttcttaggcagtctttcaggggagagaagaacttcaactagccactgcaaaataactataacattcaattgaggggcttggtagcacttgaaatgggtctctttcaaccctcacttcactatcttgatatattcccttgtcgaggcgagatcgatgccttcacaatctttctactgctcattaaaaacttgggagctcgccaagcaactcctagctagccatctaggaggattaaccactgctctcaaccccgtgatcgcacttgctttcagaatgccaacaggtagtgtcgtaggaagatgtatccgagcattarctaccaacagaaaaagatgatggaatactcagaatcttcaaaaaagtcattgtaacatgaaatcaaagtttagttttgcatttataaaattatagcctatcaacttctaacaccaatcggatgcaaacctaagtgtaggacgaaatcggaatatactgccttcaacccaaatccccaattccagaggctcaagtctttgccacagccaataggagtgtgccagcgagtcccttgcactgtacgccattgcagatatacctattgctctagactgcaatgggaaagtggaccacacttattagaactgtaatctcaaaaagctaccttgttcaaaaatcataatctgcattatgtctcaatggtagtgctgactcgtcagaatcaagaggtcacaggttcgacccctgctctaaacactcttacctttttttattttcctccctttcttatcacagactaacttgtgggaccctgctagattttacaatgaattggaacactttatttctcaactcatgcttgcatgggggatcccccttggtttatgactttttgcacaccttatttttcaacaaatgcttacatgtggaatcctggttggtttatgacgttttcatggaccttatattgtcacaaaaccaccatgtaacaacgagtgacgatttctttttggctacagtggcaactttatgacgttccgtaactttgtcactaaatttgctcggatgtgaaactttatgacgtttttagccagaaacatcatagaactatgacgagaacaaatgtgtcataaaattttcgtcatagatcaacacatttcttgtagtgtaatcaactgtctatcttagctaaactcaaaataaatcttgacaataactattgtatgaatcatatcttgtggtattttataaaaaaactatgaatattaattaataatctaagcatcataatgtgttaagaaaaatccaaaatgatacatgtttgctttatgaatgtagcacaaagtattaaggacaagacaagtatgggtgagtcaaggccacctaagcaactaacaatacaaaaagcatacttaaaaaaaaggccacccaagctgatgtggctttgacgagccaaactaatcatgacaccctcatccatatcaagatagaaacaaaaaggccatgtcttctgatgtagcaaaatgagttttataacttcggctggtatccaaatcgacaaatgacatgtcatgtccagattatgaggcatcctccaacattcagttttgcaaaggccaaaatcctacatgcatggcttggctactataaataccaccccaatcaatctctaaccca

SEQ ID NO: 485 - DNA, 1681 bp, Setaria italica
  source 1..1681: mol_type = genomic DNA
catgcaccgtaaagttgatgatgaacacttcttaggcagtctttcaggggagagaagaacttcaactagccactgcaaaataactataacattcaattgaggggcttggtagcacttgaaatgggtctctttcaaccctcacttcactatcttgatatattcccttgtcgaggcgagatcgatgccttcacaatctttctactgctcattaaaaacttgggagctcgccaagcaactcctagctagccatctaggaggattaaccactgctctcaaccccgtgatcgcacttgctttcagaatgccaacaggtagtgtcgtaggaagatgtatccgagcattarctaccaacagaaaaagatgatggaatactcagaatcttcaaaaaagtcattgtaacatgaaatcaaagtttagttttgcatttataaaattatagcctatcaacttctaacaccaatcggatgcaaacctaagtgtaggacgaaatcggaatatactgccttcaacccaaatccccaattccagaggctcaagtctttgccacagccaataggagtgtgccagcgagtcccttgcactgtacgccattgcagatatacctattgctctagactgcaatgggaaagtggaccacacttattagaactgtaatctcaaaaagctaccttgttcaaaaatcataatctgcattatgtctcaatggtagtgctgactcgtcagaatcaagaggtcacaggttcgacccctgctctaaacactcttacctttttttattttcctccctttcttatcacagactaacttgtgggaccctgctagattttacaatgaattggaacactttatttctcaactcatgcttgcatgggggatcccccttggtttatgactttttgcacaccttatttttcaacaaatgcttacatgtggaatcctggttggtttatgacgttttcatggaccttatattgtcacaaaaccaccatgtaacaacgagtgacgatttctttttggctacagtggcaactttatgacgttccgtaactttgtcactaaatttgctcggatgtgaaactttatgacgtttttagccagaaacatcatagaactatgacgagaacaaatgtgtcataaaattttcgtcatagatcaacacatttcttgtagtgtaatcaactgtctatcttagctaaactcaaaataaatcttgacaataactattgtatgaatcatatcttgtggtattttataaaaaaactatgaatattaattaataatctaagcatcataatgtgttaagaaaaatccaaaatgatacatgtttgctttatgaatgtagcacaaagtattaaggacaagacaagtatgggtgagtcaaggccacctaagcaactaacaatacaaaaagcatacttaaaaaaaaggccacccaagctgatgtggctttgacgagccaaactaatcatgacaccctcatccatatcaagatagaaacaaaaaggccatgtcttctgatgtagcaaaatgagttttataacttcggctggtatccaaatcgacaaatgacatgtcatgtccagattatgaggcatcctccaacattcagttttgcaaaggccaaaatcctacatgcatggcttggctactataaataccaccccaatcaatctctaaccca

SEQ ID NO: 486 - DNA, 513 bp, Setaria italica
  source 1..513: mol_type = genomic DNA
cctttcttttcttttccttttccttcctgcctttggccgatgtccctttgcctttacatccatgcacagataataaatctactgcacacaaaagaagatgctgatagaataacttggccactggggaacaagggtatttggtaggtacctcttcgaagcccatacatactctactggtcgctgcagcagacggtgtggtggccagaataacagctacctaggcccgtcgcgtgtctacacctgcatctatctgctcagctcaacgaattatattgccacgccccaccggcgatcaaaagctgcaaaaggcaaagaagcttcaaggagatggccagtgacaccaccctgtatatcagactgcttgtcccacaaaatatttgtttgtcccaagaataagctcacatgttgctcaaggcagctggatagctacgcaagaaacccttgggcaggctacgccccctctttccctggcttatataaaccctgccctacgtcccatcagcatcattgcag

SEQ ID NO: 487 - DNA, 1574 bp, Setaria italica
  source 1..1574: mol_type = genomic DNA
gtcagtgaccggagtaccggacacccgagttgggaacgctcaaagcaaggatctccgaacgctatgttgggcttgggtgggctcgggccctaagctaggagcctaaaacgcacaaccccaaactacatttgccaggcacacagaccagcccaatatctttgaggctgatcacatttcttagcatccctccaatcacaaataactgatttattaaaaaaatcacagtgtagtcaatgcatcaatatctctttaaatatttcaaattggattttagaaatattattttggcatatttttgcatgtgtttcatactagtaatcaattgtcaaattaatgcttcatacttgttatttgtgaaggaaaggaaaagttcttgtttgttatgcattttccctatctcttttttggataatgaataatatttcgactaactgtggatatacttcatgtacaccattaagttaaaagcagagatgcttgcacaaacgcacacaaaatctattcctatgagcatgcacctcggagagaatgagctggccaatcttacgttgttgtcgatgacatgttgcctagaataaatttagaaaaaaatattagcatccataccgagtcaaggacttaaatacaggtgagcaagcttcaccataaggaacctaaccagctgagctgttgagtccgttgttgatgttggctccatctaaatacatttgcttgttattcgatcaaacattagcaacttttagctacaagattatatgccatgagattagtgtgctcctcgaaccaatgctctcctgatcatgagagatatttaaagggaccatacataacacataggttaagattgtacaaagatggatattgattgatgcataaaaggcttcattatcaaatcatttgccgtccaaaactgaattcgattactatcattcaattgaaagggaccctcacattactaaataactttataaaaaaaactctgcttttgaatgtctaaattttttgttcatagccctccattaaactccacttagctttaaatttcttcatcaaaattgttgcttttggcgctagagaaaaaaaaaatactttgcctttaccaacgtggccttgagactagcgtcttctgcatcatacaccgtcgacgtgtgtcggtcggctgtcacgacaaaagcaaaactccactgcccctgcaaaatgaacatgttgggagattatttaagcctgagccttttaggtgacaaagccaagctaatgcgcaggtgcgagcattatacaagcgcgccgcgaccctttgcctagtgctgtccgttctgtacgtgtacctgagctggtcagctccacatgcacaagtgtataggttgtacttaccctgcctaaagcttaatggaggaggtgagatcagagctggaaagaccagccatattaccggctccctcgcccaatcctcataactaatcagtttagaaattagcttaccagatcatgcttatcattccatttaattcatgcttggttacgttcgtcctataaatacgtgttcgtcttctcatctcgtcagatcagcacgaagc

SEQ ID NO: 488 - DNA, 1545 bp, Setaria italica
  source 1..1545: mol_type = genomic DNA
ttgggaacgctcaaagcaaggatctccgaacgctatgttgggcttgggtgggctcgggccctaagctaggagcctaaaacgcacaaccccaaactacatttgccaggcacacagaccagcccaatatctttgaggctgatcacatttcttagcatccctccaatcacaaataactgatttattaaaaaaatcacagtgtagtcaatgcatcaatatctctttaaatatttcaaattggattttagaaatattattttggcatatttttgcatgtgtttcatactagtaatcaattgtcaaattaatgcttcatacttgttatttgtgaaggaaaggaaaagttcttgtttgttatgcattttccctatctcttttttggataatgaataatatttcgactaactgtggatatacttcatgtacaccattaagttaaaagcagagatgcttgcacaaacgcacacaaaatctattcctatgagcatgcacctcggagagaatgagctggccaatcttacgttgttgtcgatgacatgttgcctagaataaatttagaaaaaaatattagcatccataccgagtcaaggacttaaatacaggtgagcaagcttcaccataaggaacctaaccagctgagctgttgagtccgttgttgatgttggctccatctaaatacatttgcttgttattcgatcaaacattagcaacttttagctacaagattatatgccatgagattagtgtgctcctcgaaccaatgctctcctgatcatgagagatatttaaagggaccatacataacacataggttaagattgtacaaagatggatattgattgatgcataaaaggcttcattatcaaatcatttgccgtccaaaactgaattcgattactatcattcaattgaaagggaccctcacattactaaataactttataaaaaaaactctgcttttgaatgtctaaattttttgttcatagccctccattaaactccacttagctttaaatttcttcatcaaaattgttgcttttggcgctagagaaaaaaaaaatactttgcctttaccaacgtggccttgagactagcgtcttctgcatcatacaccgtcgacgtgtgtcggtcggctgtcacgacaaaagcaaaactccactgcccctgcaaaatgaacatgttgggagattatttaagcctgagccttttaggtgacaaagccaagctaatgcgcaggtgcgagcattatacaagcgcgccgcgaccctttgcctagtgctgtccgttctgtacgtgtacctgagctggtcagctccacatgcacaagtgtataggttgtacttaccctgcctaaagcttaatggaggaggtgagatcagagctggaaagaccagccatattaccggctccctcgcccaatcctcataactaatcagtttagaaattagcttaccagatcatgcttatcattccatttaattcatgcttggttacgttcgtcctataaatacgtgttcgtcttctcatctcgtcagatcagcacgaagc

SEQ ID NO: 489 - DNA, 976 bp, Setaria italica
  source 1..976: mol_type = genomic DNA
catccataccgagtcaaggacttaaatacaggtgagcaagcttcaccataaggaacctaaccagctgagctgttgagtccgttgttgatgttggctccatctaaatacatttgcttgttattcgatcaaacattagcaacttttagctacaagattatatgccatgagattagtgtgctcctcgaaccaatgctctcctgatcatgagagatatttaaagggaccatacataacacataggttaagattgtacaaagatggatattgattgatgcataaaaggcttcattatcaaatcatttgccgtccaaaactgaattcgattactatcattcaattgaaagggacctcacattactaaataactttataaaaaaaactctgcttttgaatgtctaaattttttgttcatagccctccattaaactccacttagctttaaatttcttcatcaaaattgttgcttttggcgctagagaaaaaaaaaatactttgcctttaccaacgtggccttgagactagcgtcttctgcatcatacaccgtcgacgtgtgtcggtcggctgtcacgacaaaagcaaaactccactgcccctgcaaaatgaacatgttgggagattatttaagcctgagccttttaggtgacaaagccaagctaatgcgcaggtgcgagcattatacaagcgcgccgcgaccctttgcctagtgctgtccgttctgtacgtgtacctgagctggtcagctccacatgcacaagtgtataggttgtacttaccctgcctaaagcttaatggaggaggtgagatcagagctggaaagaccagccatattaccggctccctcgcccaatcctcataactaatcagtttagaaattagcttaccagatcatgcttatcattccatttaattcatgcttggttacgttcgtcctataaatacgtgttcgtcttctcatctcgtcagatcagcacgaagc

SEQ ID NO: 490 - DNA, 3319 bp, Setaria italica
  source 1..3319: mol_type = genomic DNA
aacgcaaatgacaaataatggttacacaaaactgcagtctaatctgtttatgaaatctatcatatacctgtagcttgaaagcaactgctagcacgagcaaacatctcgaatgacaaataatggtttctccactcatctgcaaataagaaaatcgctcaggcaaaatctcttaaaagtgcgaaaaatgtggagttgaacaaaataaatcactaccgacacattattctgaggggcwaaacgcagatccgggccacaaagcaaccggattagaagctgacaagcttggaggctgtgttgactcaacgagcttggagattggcagatccggtgaaggtggctgcagatctgtgcagggagttgtcaatgcacaagtactatcattctaaactaggattagcttctactgctcacctttttacaagcagtcaaagtcagcatgcggtggcaccagcggaaggatcgggcttgtaacgacagtttctgatgttaatcgcgtgcttcagagattgagtaaagtgctgttaattttccagaagcctaggaaaaaacacatctggaccctaccttaagcaacaacacgtcatgcttcacagaatagcagcattataatcctggtcaaacaataccacttttgcaatatgtcaaacaaaacacatggataaactgaaatgaagtcatccctttgaagccaagggtagtctcccgatagtcaacaaagtattcttcgacgaccatcacatacacacatacaactagcagcatcataatcataacagtgatctgaacggaattgttagacgatttacatttcctcgctatagatttattcaaaataaggccaaacatcttctatggatgttctaatcataactaatgtaacatcaagagaaaaaaggtaatgctttgaccaaattggtgaaatatggtaatataacacattataattatgaacctaatcaaagtgttctgggccacataaaataaattaaaagatatttgccaacgaatataatgccttcttttttaatcaatgcttgcttacaaattacaagcatatccctgtgaggggcacacaaaatctggccaccacatccggggtttggtagaagaaacatcatatcagaataacatatacattaaacagctctccgatcagttgcgtaataacatatcagaataacatcatatctagatatagtatatgtctagatgcataataatatctataaatttagaaaagctaaaacgacctacaatttggaatggagggagtagttgttttctttatttagagttcgatcggttacgtaatagtttcctttaattattcatggcagcttccactgacttactaagaaatcatagacaaattattttcagctgatgcatgacaaaaaataaataatgcttgcctacctactaaaactttggccctttcttctcagaaatgttggtaagagtaaattaccagagtagaccgggaaaggggaggaggagaacataagacagctatgaatcaggagcctagtcaaatgagcaggtaaccttgtccatgtcacttttttttttggtctcctccagggttcagcagttgcttgggatgctaaaagtttgtgacctcttttgaggcatgtaacatgctatcagtatagttgctagggatataaaattttactcctctaccatatgcaagaagccacgaacctatctgctctttgcaatgcattcatgacaaactacagatgtgcatgcatgcctctgaagtcttctgacagtaactaccctaaaaaaaatcttctgacagtaactgccctaaaaaaaagtatgctgacagtaacaaagcacgctgttgttttgttccttgaaggaaccggccactgatacgtgctgcacggaagaaccaagctttctcccgacctgtttgagtttggaagctttcaaacaaacaacatccaagctaagtccttccaggaacctgctgctgctctcgtgacaagaatgtaggccatgcgagcacctaacacacggatcatcacgcgccgtgtggctcagagttggtacaccacatcatatcgcctggattggtctgtgtacttgtgtcccctgggaaaatcagtcacttatttttagacccctggattgaacacagaataatgcaatgcaaccatgttaagcatgttgtgcacagccgtttgacaagccattccccatctttcatgtagtgatcctcacctagctaatgtaacacggcaaaactaccctaatttggcagtagaactctgatgtatggaaccatgacgaataaatggaaaatcttagacgctactcactactcatcttgaatcccagaagcttgtgtacctttcattatcatttccacaaagacagggatactgatacgtgttcaatgatgaccgaaccattaaaaaccaaagaaaccaggggcatagtctgcatatggtcgtcattaatatagtaaattaagttcaaactgtaacaacccttgtgtataacaaaagaagctggactaactatgaagcaaaaccatgcttttcgccgaggctcctctgaactttggttgcttggtttcacatagtgttaaactgttaataagcgaggttatatagttcgggtgaatatattactactgggacgaactgatatctaccactaatctactgtaaagctgcctaattttgctgtagctagatttcccggaagggggctcttgtatgctgcagaggacatattcaactgatcaatttatagacagaaagttgcatattctatcattgtgcctagcccctagctatatgatcagcataatcagcaatccatcatatcttcttctcagtgtttttttttttgctgggcgaaacaatattctttatttcagttcaatcctgtttaagcagcacttgctgtttctgcagtaacctgtaaccgtactgtacctactgctgacttgtcgcttctgagtggaaaaatgtctcacctgatcagaaacgatttcttcgcctacaattatttgggactagaagctcaatgctgtccatgcaaatttcggttaaaactgaagcatcaacagtcaaaatgtcagctaaaactgaggcatcaacagtcatacttgcagccagatggaagaacaaccgtagcagttggacacaatgtggagtcgacctagctcgctcgtttgctcaccctcttattctataagcatcaccctaacaaatccctaaccaccttcccttcgttacacacatgctagctgcctccctccagctataaatagcacccaaagcccatctcatctggccat

SEQ ID NO: 491 - DNA, 3318 bp, Setaria italica
  source 1..3318: mol_type = genomic DNA
acgcaaatgacaaataatggttacacaaaactgcagtctaatctgtttatgaaatctatcatatacctgtagcttgaaagcaactgctagcacgagcaaacatctcgaatgacaaataatggtttctccactcatctgcaaataagaaaatcgctcaggcaaaatctcttaaaagtgcgaaaaatgtggagttgaacaaaataaatcactaccgacacattattctgaggggcwaaacgcagatccgggccacaaagcaaccggattagaagctgacaagcttggaggctgtgttgactcaacgagcttggagattggcagatccggtgaaggtggctgcagatctgtgcagggagttgtcaatgcacaagtactatcattctaaactaggattagcttctactgctcacctttttacaagcagtcaaagtcagcatgcggtggcaccagcggaaggatcgggcttgtaacgacagtttctgatgttaatcgcgtgcttcagagattgagtaaagtgctgttaattttccagaagcctaggaaaaaacacatctggaccctaccttaagcaacaacacgtcatgcttcacagaatagcagcattataatcctggtcaaacaataccacttttgcaatatgtcaaacaaaacacatggataaactgaaatgaagtcatccctttgaagccaagggtagtctcccgatagtcaacaaagtattcttcgacgaccatcacatacacacatacaactagcagcatcataatcataacagtgatctgaacggaattgttagacgatttacatttcctcgctatagatttattcaaaataaggccaaacatcttctatggatgttctaatcataactaatgtaacatcaagagaaaaaaggtaatgctttgaccaaattggtgaaatatggtaatataacacattataattatgaacctaatcaaagtgttctgggccacataaaataaattaaaagatatttgccaacgaatataatgccttcttttttaatcaatgcttgcttacaaattacaagcatatccctgtgaggggcacacaaaatctggccaccacatccggggtttggtagaagaaacatcatatcagaataacatatacattaaacagctctccgatcagttgcgtaataacatatcagaataacatcatatctagatatagtatatgtctagatgcataataatatctataaatttagaaaagctaaaacgacctacaatttggaatggagggagtagttgttttctttatttagagttcgatcggttacgtaatagtttcctttaattattcatggcagcttccactgacttactaagaaatcatagacaaattattttcagctgatgcatgacaaaaaataaataatgcttgcctacctactaaaactttggccctttcttctcagaaatgttggtaagagtaaattaccagagtagaccgggaaaggggaggaggagaacataagacagctatgaatcaggagcctagtcaaatgagcaggtaaccttgtccatgtcacttttttttttggtctcctccagggttcagcagttgcttgggatgctaaaagtttgtgacctcttttgaggcatgtaacatgctatcagtatagttgctagggatataaaattttactcctctaccatatgcaagaagccacgaacctatctgctctttgcaatgcattcatgacaaactacagatgtgcatgcatgcctctgaagtcttctgacagtaactaccctaaaaaaaatcttctgacagtaactgccctaaaaaaaagtatgctgacagtaacaaagcacgctgttgttttgttccttgaaggaaccggccactgatacgtgctgcacggaagaaccaagctttctcccgacctgtttgagtttggaagctttcaaacaaacaacatccaagctaagtccttccaggaacctgctgctgctctcgtgacaagaatgtaggccatgcgagcacctaacacacggatcatcacgcgccgtgtggctcagagttggtacaccacatcatatcgcctggattggtctgtgtacttgtgtcccctgggaaaatcagtcacttatttttagacccctggattgaacacagaataatgcaatgcaaccatgttaagcatgttgtgcacagccgtttgacaagccattccccatctttcatgtagtgatcctcacctagctaatgtaacacggcaaaactaccctaatttggcagtagaactctgatgtatggaaccatgacgaataaatggaaaatcttagacgctactcactactcatcttgaatcccagaagcttgtgtacctttcattatcatttccacaaagacagggatactgatacgtgttcaatgatgaccgaaccattaaaaaccaaagaaaccaggggcatagtctgcatatggtcgtcattaatatagtaaattaagttcaaactgtaacaacccttgtgtataacaaaagaagctggactaactatgaagcaaaaccatgcttttcgccgaggctcctctgaactttggttgcttggtttcacatagtgttaaactgttaataagcgaggttatatagttcgggtgaatatattactactgggacgaactgatatctaccactaatctactgtaaagctgcctaattttgctgtagctagatttcccggaagggggctcttgtatgctgcagaggacatattcaactgatcaatttatagacagaaagttgcatattctatcattgtgcctagcccctagctatatgatcagcataatcagcaatccatcatatcttcttctcagtgtttttttttttgctgggcgaaacaatattctttatttcagttcaatcctgtttaagcagcacttgctgtttctgcagtaacctgtaaccgtactgtacctactgctgacttgtcgcttctgagtggaaaaatgtctcacctgatcagaaacgatttcttcgcctacaattatttgggactagaagctcaatgctgtccatgcaaatttcggttaaaactgaagcatcaacagtcaaaatgtcagctaaaactgaggcatcaacagtcatacttgcagccagatggaagaacaaccgtagcagttggacacaatgtggagtcgacctagctcgctcgtttgctcaccctcttattctataagcatcaccctaacaaatccctaaccaccttcccttcgttacacacatgctagctgcctccctccagctataaatagcacccaaagcccatctcatctggccat

SEQ ID NO: 492 - DNA, 1005 bp, Setaria italica
  source 1..1005: mol_type = genomic DNA
cttagacgctactcactactcatcttgaatcccagaagcttgtgtacctttcattatcatttccacaaagacagggatactgatacgtgttcaatgatgaccgaaccattaaaaaccaaagaaaccaggggcatagtctgcatatggtcgtcattaatatagtaaattaagttcaaactgtaacaacccttgtgtataacaaaagaagctggactaactatgaagcaaaaccatgcttttcgccgaggctcctctgaactttggttgcttggtttcacatagtgttaaactgttaataagcgaggttatatagttcgggtgaatatattactactgggacgaactgatatctaccactaatctactgtaaagctgcctaattttgctgtagctagatttcccggaagggggctcttgtatgctgcagaggacatattcaactgatcaatttatagacagaaagttgcatattctatcattgtgcctagcccctagctatatgatcagcataatcagcaatccatcatatcttcttctcagtgtttttttttttgctgggcgaaacaatattctttatttcagttcaatcctgtttaagcagcacttgctgtttctgcagtaacctgtaaccgtactgtacctactgctgacttgtcgcttctgagtggaaaaatgtctcacctgatcagaaacgatttcttcgcctacaattatttgggactagaagctcaatgctgtccatgcaaatttcggttaaaactgaagcatcaacagtcaaaatgtcagctaaaactgaggcatcaacagtcatacttgcagccagatggaagaacaaccgtagcagttggacacaatgtggagtcgacctagctcgctcgtttgctcaccctcttattctataagcatcaccctaacaaatccctaaccaccttcccttcgttacacacatgctagctgcctccctccagctataaatagcacccaaagcccatctcatctggccat

SEQ ID NO: 493 - DNA, 654 bp, Setaria italica; identical to SEQ ID NO: 79
  source 1..654: mol_type = genomic DNA

SEQ ID NO: 494 - DNA, 2609 bp, Setaria italica
  source 1..2609: mol_type = genomic DNA
acatcgtattgtatttaggtgcatgcctatctgtagctcgatggaaaatgcacactttacgagaagtactacttttccacgtgggagttagccatgagcgagcaccgtgactgatgaaaacatgggcccggttgggccttttcggcctcaattagcaacaaacttagacgaccggcaagggggaaaacggcccatatacaataacagaccttaatttcttctcctctcattttggcccgtcccatgttggtcggaggacatcatgcatgattcatcgcagagatcggacgacccacgaagcccatgatagacctcctccttccctcctctccatgttcttcacaaaaaagccccttctgcacctctcgtgttcatctctggaaagaagcccccgctccctccattgcccgacttcggcggcgctaccatgcaatgcaaccatggccaacccccctgaccgttgtgagcacgacaccccatctcttgcttgtccaaccaccctccaccactactgcggcgagcggcgccgcgtctccgtccgcccaagcgggcggtggcgcctggccgcagcatcagtagcaactagggttggagtgtgaatagaggagaagaggaagaataactctgcaattttggtcattgcaaggatctcaatgcacaagatgtggaacctcctagaagatggataggattttccgttgttggtgcactgacaagttgggtcatgctcataataggaaatgttggtcacacagccaacctgcaggtcggagggttgattcacatggttgcgtatcacgggcgtgatacgaatacccccggacggccggtgtacatgcaatctcgtaattgatgtactgtaccgaccggtagttcgaacacacatgtatatgtttgacctggctgaaaaaagattttcagttgcattcatgttccattatcggtcgattatacatgtagcgcgaaatatgtgtgtacgtgatacatgcatgcaatagcatagtagcagtagcaaaaatacgaaaaacatcattctggattccaagttttggtccttcatttttcgaaaataaaaggatttgcacatgcatggtctgccgagtttgtgtatgtccgactaaaggagtgctaaagtgtggcatatataggacgatttcaccggcatgcttatgcttatgctacggtgtgtaaaccgacgcagcagctagctagatttgtttactgctgaaacgacgccctgatgacagtgacagaaacgtggcaaagctaactgtaaccgaatatatagttcggtgcatatgcctgtgctgtgtatatcctagctagctcctatttcatttctagtatcctaatgggagccaatttcaagatccgttgacctagtatgtcgagagtgtttacagggatagagttacgccattgcgtgtattttaaaggataaatgtgcatacgtatatacgggcgtttgtatctttacactatgttttcaaagaaagaaaaaaaactaatacttatccctcctgctgcggcggcaatatcatatcaaaaccccccgtatgtttcaggaaaaatggatcgaataaaacatctggagtagaactgtagaatcaaacgcgcgtctctctttcaaaaaaaaaaaaaggaaatcaaacgcgtgtgccgcgcggcgatttttttaaacaagctcaacgcctagtggatgatgagagtagagacgtgcatgcatccgcaggtcagctgcttgagctgtacgtgcgcttgctgcgaccttcgcggccgcgcaccatgttccctccccctgttttaatgggagttgatcgacatcgcgtgcgtccatggcaacatgaacgcgtgcacgccgcgcgcgatgtcatccctgccgtcgtcgttgtagacccggccacccgggcatgtatgggaaatggaactatggattcgtacatacttctcaaaaatgcaaccgtaactttacagttcgatcttacccagtgaccaataatcaccatttgcgctctctttttcttatttcttatgactaccttgtatgctgaggataacgtaagaatttgattaagaatttgattgtgtgcggagctgtttaggctggaaacaatttctttttctaaacagtactctctccgttccaaattgtagatcattttaacttttctaagttcatagatattattatacacttagagatacactgtatctagatgcataataatatctatgaattacaaaaagctaaaataacctacaatttgagcggagcggagggagtattatctgcaaacacaaagtgcactgggtgtagaacttcccaccacttcatcaaagccccccggggcgagccaatcagacggcgccacaatcagagcgcgtgtgccgcgcgcgtcgcttaattaacaacaacgcgcgcgcaacttgatcggatatgatgaagcatcgccggtcagctgcttgagctgttacgtgggcttccttccggtggacctccgcgtccatggcaacatgcgccgccgaaaaccacggagacagtgtccctgtcacacttgtacccttccgcgagctataaattgcacccctaaccatgtcgcagagcacac

SEQ ID NO: 495 - DNA, 1024 bp, Setaria italica
  source 1..1024: mol_type = genomic DNA
catctggagtagaactgtagaatcaaacgcgcgtctctctttcaaaaaaaaaaaaaggaaatcaaacgcgtgtgccgcgcggcgatttttttaaacaagctcaacgcctagtggatgatgagagtagagacgtgcatgcatccgcaggtcagctgcttgagctgtacgtgcgcttgctgcgaccttcgcggccgcgcaccatgttccctccccctgttttaatgggagttgatcgacatcgcgtgcgtccatggcaacatgaacgcgtgcacgccgcgcgcgatgtcatccctgccgtcgtcgttgtagacccggccacccgggcatgtatgggaaatggaactatggattcgtacatacttctcaaaaatgcaaccgtaactttacagttcgatcttacccagtgaccaataatcaccatttgcgctctctttttcttatttcttatgactaccttgtatgctgaggataacgtaagaatttgattaagaatttgattgtgtgcggagctgtttaggctggaaacaatttctttttctaaacagtactctctccgttccaaattgtagatcattttaacttttctaagttcatagatattattatacacttagagatacactgtatctagatgcataataatatctatgaattacaaaaagctaaaataacctacaatttgagcggagcggagggagtattatctgcaaacacaaagtgcactgggtgtagaacttcccaccacttcatcaaagccccccggggcgagccaatcagacggcgccacaatcagagcgcgtgtgccgcgcgcgtcgcttaattaacaacaacgcgcgcgcaacttgatcggatatgatgaagcatcgccggtcagctgcttgagctgttacgtgggcttccttccggtggacctccgcgtccatggcaacatgcgccgccgaaaaccacggagacagtgtccctgtcacacttgtacccttccgcgagctataaattgcacccctaaccatgtcgcagagcacac

SEQ ID NO: 496 - DNA, 658 bp, Setaria italica
  source 1..658: mol_type = genomic DNA
atctaccactaatctactgtaaagctgcctaattttgctgtagctagatttcccggaagggggctcttgtatgctgcagaggacatattcaactgatcaatttatagacagaaagttgcatattctatcattgtgcctagcccctagctatatgatcagcataatcagcaatccatcatatcttcttctcagtgtttttttttttgctgggcgaaacaatattctttatttcagttcaatcctgtttaagcagcacttgctgtttctgcagtaacctgtaaccgtactgtacctactgctgacttgtcgcttctgagtggaaaaatgtctcacctgatcagaaacgatttcttcgcctacaattatttgggactagaagctcaatgctgtccatgcaaatttcggttaaaactgaagcatcaacagtcaaaatgtcagctaaaactgaggcatcaacagtcatacttgcagccagatggaagaacaaccgtagcagttggacacaatgtggagtcgacctagctcgctcgtttgctcaccctcttattctataagcatcaccctaacaaatccctaaccaccttcccttcgttacacacatgctagctgcctccctccagctataaatagcacccaaagcccatctcatctggccatc

SEQ ID NO: 497 - DNA, 1166 bp, Setaria italica
  source 1..1166: mol_type = genomic DNA
ccaaaatgtaggccgatggcaacatgtcagcaatactctctctagccctaaacgaaggacattcagaaaactcagacaaattattaaaattatttatttatcatatttaggctaattgacagtcgttgcaaattataatttaatagagtaacaatgacaaaaaaaattgggataaattttggatcacataataactttattttaggaacggagggaattctcctatgttccatatggttaatactttaatagattaaggtactacctcctttcttaaatacatgacaccattaatttttttcattcatttgactattcatttatatataaatatttatgctttatgctaatagataaatctctaaatcaaattcaaagtaatttaaggaaagacatagcggtactcattttattttacttaactaatttactaaatagatattgttgtcaaaatttaagaaaaaaaagttaacggcgtcataaattttgaaaaaggagagaatatgttttcagataacacgcatgcttaatttctaatctttatcctttgattggctgaaaaagatacgaacaatgaacgaaatataaaaatagccgaatacatcaccatgtagatcgagaccggaatatttggtttttcaccgtctaaaaaagacttataataaacaacggctataatatctctcatgagtcatgattgtatactagatagaccccatcgtgatatacaaattaaaaatagccgtatacatcaatggtgagaccggaacattttgttttccaccgtggaaaagaaagttgtacaagtaccccaacagccgctatatctgtcatgagtcatgactttatactagaccccaccatgataaccttgagcagcaaaatattcacaggatcaaggatcaacagcaacattatgcataccacaaatcttgtggcagagttgcactggcaccaagaaccgaatccatcccacggataagatatgccatgtggcgggcggccagtgggtggaatcgacggggggcgaccgccgcgccggctggggataatccgcgcccatgcaatttgaggccattacacctcaccctctcatcactctctctccatccgacgccgaggtcgcgacacacctgagcagggagcgcgtgccagtgccaccaccc

SEQ ID NO: 498 - DNA, 1482 bp, Setaria italica
  source 1..1482: mol_type = genomic DNA
gcgcaggggttgggccggaatgggagttgctcggctcatgagaggtttaagggtttctattgatttgagtaagatttgtaatttaaatttgaattggttttcaaaattggctgggatttgagatgtgggctgggatagggtacagaaatgggacttttaaaaggatcctcaagttaggaatatttgactgagatgagatgggaatcctatagggttttggttgctattaatactcaaatggaatttgaatattatttctaggttttgcgagaggaaggatttggaaatttctatttctaaaaggggttctaagggaaacaatcacgtgcaacacatatgctaatattttgtgcaagatttatttataaaaaggttttgaatattcgggaagaaggtatgtgtttagtctaagaaaaaatttaaaaagtacgtattttaaatgctctaaaacgtggacgttacattttatgttgtattcctgttgatgtacatctcacacgtatcaaccgcaattgtattgtacacgttacctcatcaaaaatttatgtgaggaaaccttcaagtgaaaattcataaagagaaaaagagtacaacattaaatcttcttagctatataatattctatatttgctattctttatatgaatagtaatcaatcttcaagctttatacataaacttcatgattcttgcaataaagatctgcatgatctaaataatcaagtggtatagcttcatgttaaaattcaataattaatcaagttgattccttctagatataatttaaaagactttagatctaaacatgattaaagatatgctcccctcctagcgacatcttttgaatgtgttcaaaatgtcttagtcacattcttcataaatgcataagatggaggaaccgcatctttcccgcaatcggccattgctgcgtgctgcatcaacctccatggatccttattgaaaactactctcccgtggcctcttccacgacgtgactctactctcccgtggcctcttcccgcagacgcagaggcctgcagccgtgttgaaacccggcggggaccgtaccactttggcttcgatgtcgccaattcctcgctgtcccgtgctccaggttcactagcagccgcgtgagaaaaactggcggggctcgccgcgccgagaaaaatctcgccacacagctcacgagtcacgacggacaccgagaggccgagaccgcagaggcaaggaaagccgcaagcggcgttggcgagaggcggccaagcggaagctagctgccagcgtggatcgccatcccgccccgtcgtccagaagataaggagcgccgctaggtgccgacacgtcgcgccggacgagataaggataggccagcctggccgggtgacgccaccggcgaacggtgtccactcctgccacatccggccatggagccgctggctatttatatacgccgccggtggagaggagcctctcaagcaagact

SEQ ID NO: 499 - DNA, 1833 bp, Setaria italica
  source 1..1833: mol_type = genomic DNA
tatcggcgaccgctaagagaagacatttaaaataagtagtcggcattgtgataaaaagagagcgcgattactgatgtgcaggttctcgattgttgatgaagtcgactagtcggagtcgattctgactagttattgattgtatggaacccgccctcgactagttttctagtcgagacgagtagtcgaagtagaccatcctcaactacttttctagttgagatgagtagtcgaagtagtcgtcggcgacttgattatttgcctcaatctgtgtgtgacttgatcgacgagccgtatgcagcagcttgcggtggaaaccgactcagtcttcgattggaacacggagcgcgtcaattctatgtcgacgtagatttgtctgcttggaactccaactcagtgacttgcttcttgttgagtagattgatcttgatgatgaggtccttcaagctcgcctgatgatctcgacgatcacctctacctgacgcgccaactgttggtgcttagacccagcaacctaccgagggggtacccgaggtagtgttttgtggtggggctcgtcgaagatcaggaacttgaaggtgaactcgaacacacgatttagacaagttcgggctgcttatgccgcataataccccatgtcatgtgtgttggttggattgtattgattgatcagatatttggagggggccctgcctcgccttatattgcccattgccggaggcagggctacaggtcggttgttgtacaagagtactagtcggttttgaccagcgagtcctactctaattgctacaagtagtttcctaatccttgactagtccttgtccgccacgtagaccacgacgtcttgcacctagtctctgtgtttgatacatcttggtgtacagtccgatattgtaggactatccaagcttcccagtaggcccatagatgtatggccgacaactggataatgtaactctgggtcagtactatccttatctatatagacacaaacaacgtactatagcagaagtttaagctcgtaacccaccaatatttggtggcatagaccacgtattgctgatatagtgctcgtaacccaccaatatttcgtggcatagagatctcttaggcaataaattagcagtacgaaacaatctatgtccacgtgttgctaatacaatgttctaaaccttacagcctactggacagttctctagccatgatacatgtgcatgtccgaacaaatatttatgggtacccgaaaggttaattttttgtagtatttatgagggggaggggggcgttgacgaaaaaaataacttagctaagcgtaattggcttaaaaacatacaatgttgttccagcatcaagcctacgtgatcatttcacaaaaccaactcaaaagataggtgtcatgttccttttagtgcaaaacttaaggacacctaccttgcaaaacttagctttgttacccagaatgaaccgctaagctcgaggagctctgaacttacatgaccaaatatattaaacacaaaagtcatgcatgattttctttaataagtatcgagcaatatggttcgggtgtctttcgtctcatacctctattgtcctccgtgatcaacaagggtggatccgggtggtgcaagggggctcaagcccccctacctctcccaaaggagaaagaagggagaagaaagtgaaggaagaagaaaccccctatattctaatgctacctccgccactgctgatcaacacaacattcttaaaaccatttccttggcatttgcgcatgttacaaggtacaaaagagccagcccatatgccaagttactaaactaaactatgatccac

SEQ ID NO: 500 - DNA, 2051 bp, Setaria italica
  source 1..2051: mol_type = genomic DNA
atcggcgaccgctaagagaagacatttaaaataagtagtcggcattgtgataaaaagagagcgcgattactgatgtgcaggttctcgattgttgatgaagtcgactagtcggagtcgattctgactagttattgattgtatggaacccgccctcgactagttttctagtcgagacgagtagtcgaagtagaccatcctcaactacttttctagttgagatgagtagtcgaagtagtcgtcggcgacttgattatttgcctcaatctgtgtgtgacttgatcgacgagccgtatgcagcagcttgcggtggaaaccgactcagtcttcgattggaacacggagcgcgtcaattctatgtcgacgtagatttgtctgcttggaactccaactcagtgacttgcttcttgttgagtagattgatcttgatgatgaggtccttcaagctcgcctgatgatctcgacgatcacctctacctgacgcgccaactgttggtgcttagacccagcaacctaccgagggggtacccgaggtagtgttttgtggtggggctcgtcgaagatcaggaacttgaaggtgaactcgaacacacgatttagacaagttcgggctgcttatgccgcataataccccatgtcatgtgtgttggttggattgtattgattgatcagatatttggagggggccctgcctcgccttatattgcccattgccggaggcagggctacaggtcggttgttgtacaagagtactagtcggttttgaccagcgagtcctactctaattgctacaagtagtttcctaatccttgactagtccttgtccgccacgtagaccacgacgtcttgcacctagtctctgtgtttgatacatcttggtgtacagtccgatattgtaggactatccaagcttcccagtaggcccatagatgtatggccgacaactggataatgtaactctgggtcagtactatccttatctatatagacacaaacaacgtactatagcagaagtttaagctcgtaacccaccaatatttggtggcatagaccacgtattgctgatatagtgctcgtaacccaccaatatttcgtggcatagagatctcttaggcaataaattagcagtacgaaacaatctatgtccacgtgttgctaatacaatgttctaaaccttacagcctactggacagttctctagccatgatacatgtgcatgtccgaacaaatatttatgggtacccgaaaggttaattttttgtagtatttatgagggggaggggggcgttgacgaaaaaaataacttagctaagcgtaattggcttaaaaacatacaatgttgttccagcatcaagcctacgtgatcatttcacaaaaccaactcaaaagataggtgtcatgttccttttagtgcaaaacttaaggacacctaccttgcaaaacttagctttgttacccagaatgaaccgctaagctcgaggagctctgaacttacatgaccaaatatattaaacacaaaagtcatgcatgattttctttaataagtatcgagcaatatggttcgggtgtctttcgtctcatacctctattgtcctccgtgatcaacaagggtggatccgggtggtgcaaggggggctcaaagcccccctacctctcccaaaggagaaagaagggagaagaaagtgaaggaagaagaaaccccctatattctaatgctacctccgccactgctgatcaacacaacattcttaaaaccatttccttggcatttgcgcatgttacaaggtacaaaagagccagcccatatgccaagttactaaactaaactatgatccaccatggagcgagaacaaacgtcaacaggcatcaaccaatgcagcaatcttgatcgctagtactgtccggcattatatctgaaacaaatccagatcacccatctcatcacagtcacatgcattcatggtcacgggaaccgttagcaaaccaccaactaatcagcattgcaacactcttcctcctataaatgcagcgagcgggggacaccataaaccatc

SEQ ID NO: 501 - DNA, 2014 bp, Setaria italica
  source 1..2014: mol_type = genomic DNA
gtcggcattgtgataaaaagagagcgcgattactgatgtgcaggttctcgattgttgatgaagtcgactagtcggagtcgattctgactagttattgattgtatggaacccgccctcgactagttttctagtcgagacgagtagtcgaagtagaccatcctcaactacttttctagttgagatgagtagtcgaagtagtcgtcggcgacttgattatttgcctcaatctgtgtgtgacttgatcgacgagccgtatgcagcagcttgcggtggaaaccgactcagtcttcgattggaacacggagcgcgtcaattctatgtcgacgtagatttgtctgcttggaactccaactcagtgacttgcttcttgttgagtagattgatcttgatgatgaggtccttcaagctcgcctgatgatctcgacgatcacctctacctgacgcgccaactgttggtgcttagacccagcaacctaccgagggggtacccgaggtagtgttttgtggtggggctcgtcgaagatcaggaacttgaaggtgaactcgaacacacgatttagacaagttcgggctgcttatgccgcataataccccatgtcatgtgtgttggttggattgtattgattgatcagatatttggagggggccctgcctcgccttatattgcccattgccggaggcagggctacaggtcggttgttgtacaagagtactagtcggttttgaccagcgagtcctactctaattgctacaagtagtttcctaatccttgactagtccttgtccgccacgtagaccacgacgtcttgcacctagtctctgtgtttgatacatcttggtgtacagtccgatattgtaggactatccaagcttcccagtaggcccatagatgtatggccgacaactggataatgtaactctgggtcagtactatccttatctatatagacacaaacaacgtactatagcagaagtttaagctcgtaacccaccaatatttggtggcatagaccacgtattgctgatatagtgctcgtaacccaccaatatttcgtggcatagagatctcttaggcaataaattagcagtacgaaacaatctatgtccacgtgttgctaatacaatgttctaaaccttacagcctactggacagttctctagccatgatacatgtgcatgtccgaacaaatatttatgggtacccgaaaggttaattttttgtagtatttatgagggggaggggggcgttgacgaaaaaaataacttagctaagcgtaattggcttaaaaacatacaatgttgttccagcatcaagcctacgtgatcatttcacaaaaccaactcaaaagataggtgtcatgttccttttagtgcaaaacttaaggacacctaccttgcaaaacttagctttgttacccagaatgaaccgctaagctcgaggagctctgaacttacatgaccaaatatattaaacacaaaagtcatgcatgattttctttaataagtatcgagcaatatggttcgggtgtctttcgtctcatacctctattgtcctccgtgatcaacaagggtggatccgggtggtgcaaggggggctcaaagcccccctacctctcccaaaggagaaagaagggagaagaaagtgaaggaagaagaaaccccctatattctaatgctacctccgccactgctgatcaacacaacattcttaaaaccatttccttggcatttgcgcatgttacaaggtacaaaagagccagcccatatgccaagttactaaactaaactatgatccaccatggagcgagaacaaacgtcaacaggcatcaaccaatgcagcaatcttgatcgctagtactgtccggcattatatctgaaacaaatccagatcacccatctcatcacagtcacatgcattcatggtcacgggaaccgttagcaaaccaccaactaatcagcattgcaacactcttcctcctataaatgcagcgagcgggggacaccataaaccatc

SEQ ID NO: 502 - DNA, 2026 bp, Setaria italica
  source 1..2026: mol_type = genomic DNA
gtcggcattgtgataaaaagagagcgcgattactgatgtgcaggttctcgattgttgatgaagtcgactagtcggagtcgattctgactagttattgattgtatggaacccgccctcgactagttttctagtcgagacgagtagtcgaagtagaccatcctcaactacttttctagttgagatgagtagtcgaagtagtcgtcggcgacttgattatttgcctcaatctgtgtgtgacttgatcgacgagccgtatgcagcagcttgcggtggaaaccgactcagtcttcgattggaacacggagcgcgtcaattctatgtcgacgtagatttgtctgcttggaactccaactcagtgacttgcttcttgttgagtagattgatcttgatgatgaggtccttcaagctcgcctgatgatctcgacgatcacctctacctgacgcgccaactgttggtgcttagacccagcaacctaccgagggggtacccgaggtagtgttttgtggtggggctcgtcgaagatcaggaacttgaaggtgaactcgaacacacgatttagacaagttcgggctgcttatgccgcataataccccatgtcatgtgtgttggttggattgtattgattgatcagatatttggagggggccctgcctcgccttatattgcccattgccggaggcagggctacaggtcggttgttgtacaagagtactagtcggttttgaccagcgagtcctactctaattgctacaagtagtttcctaatccttgactagtccttgtccgccacgtagaccacgacgtcttgcacctagtctctgtgtttgatacatcttggtgtacagtccgatattgtaggactatccaagcttcccagtaggcccatagatgtatggccgacaactggataatgtaactctgggtcagtactatccttatctatatagacacaaacaacgtactatagcagaagtttaagctcgtaacccaccaatatttggtggcatagaccacgtattgctgatatagtgctcgtaacccaccaatatttcgtggcatagagatctcttaggcaataaattagcagtacgaaacaatctatgtccacgtgttgctaatacaatgttctaaaccttacagcctactggacagttctctagccatgatacatgtgcatgtccgaacaaatatttatgggtacccgaaaggttaattttttgtagtatttatgagggggaggggggcgttgacgaaaaaaataacttagctaagcgtaattggcttaaaaacatacaatgttgttccagcatcaagcctacgtgatcatttcacaaaaccaactcaaaagataggtgtcatgttccttttagtgcaaaacttaaggacacctaccttgcaaaacttagctttgttacccagaatgaaccgctaagctcgaggagctctgaacttacatgaccaaatatattaaacacaaaagtcatgcatgattttctttaataagtatcgagcaatatggttcgggtgtctttcgtctcatacctctattgtcctccgtgatcaacaagggtggatccgggtggtgcaaggggggctcaaagcccccctacctctcccaaaggagaaagaagggagaagaaagtgaaggaagaagaaaccccctatattctaatgctacctccgccactgctgatcaacacaacattcttaaaaccatttccttggcatttgcgcatgttacaaggtacaaaagagccagcccatatgccaagttactaaactaaactatgatccaccatggagcgagaacaaacgtcaacaggcatcaaccaatgcagcaatcttgatcgctagtactgtccggcattatatctgaaacaaatccagatcacccatctcatcacagtcacatgcattcatggtcacgggaaccgttagcaaaccaccaactaatcagcattgcaacactcttcctcctataaatgcagcgagcgggggacaccataaaccatcacaggcacttag

SEQ ID NO: 503 - DNA, 2072 bp, Setaria italica
  source 1..2072: mol_type = genomic DNA
gagagcgcgattactgatgtgcaggttctcgattgttgatgaagtcgactagtcggagtcgattctgactagttattgattgtatggaacccgccctcgactagttttctagtcgagacgagtagtcgaagtagaccatcctcaactacttttctagttgagatgagtagtcgaagtagtcgtcggcgacttgattatttgcctcaatctgtgtgtgacttgatcgacgagccgtatgcagcagcttgcggtggaaaccgactcagtcttcgattggaacacggagcgcgtcaattctatgtcgacgtagatttgtctgcttggaactccaactcagtgacttgcttcttgttgagtagattgatcttgatgatgaggtccttcaagctcgcctgatgatctcgacgatcacctctacctgacgcgccaactgttggtgcttagacccagcaacctaccgagggggtacccgaggtagtgttttgtggtggggctcgtcgaagatcaggaacttgaaggtgaactcgaacacacgatttagacaagttcgggctgcttatgccgcataataccccatgtcatgtgtgttggttggattgtattgattgatcagatatttggagggggccctgcctcgccttatattgcccattgccggaggcagggctacaggtcggttgttgtacaagagtactagtcggttttgaccagcgagtcctactctaattgctacaagtagtttcctaatccttgactagtccttgtccgccacgtagaccacgacgtcttgcacctagtctctgtgtttgatacatcttggtgtacagtccgatattgtaggactatccaagcttcccagtaggcccatagatgtatggccgacaactggataatgtaactctgggtcagtactatccttatctatatagacacaaacaacgtactatagcagaagtttaagctcgtaacccaccaatatttggtggcatagaccacgtattgctgatatagtgctcgtaacccaccaatatttcgtggcatagagatctcttaggcaataaattagcagtacgaaacaatctatgtccacgtgttgctaatacaatgttctaaaccttacagcctactggacagttctctagccatgatacatgtgcatgtccgaacaaatatttatgggtacccgaaaggttaattttttgtagtatttatgagggggaggggggcgttgacgaaaaaaataacttagctaagcgtaattggcttaaaaacatacaatgttgttccagcatcaagcctacgtgatcatttcacaaaaccaactcaaaagataggtgtcatgttccttttagtgcaaaacttaaggacacctaccttgcaaaacttagctttgttacccagaatgaaccgctaagctcgaggagctctgaacttacatgaccaaatatattaaacacaaaagtcatgcatgattttctttaataagtatcgagcaatatggttcgggtgtctttcgtctcatacctctattgtcctccgtgatcaacaagggtggatccgggtggtgcaagggggctcaagcccccctacctctcccaaaggagaaagaagggagaagaaagtgaaggaagaagaaaccccctatattctaatgctacctccgccactgctgatcaacacaacattcttaaaaccatttccttggcatttgcgcatgttacaaggtacaaaagagccagcccatatgccaagttactaaactaaactatgatccaccatggagcgagaacaaacgtcaacaggcatcaaccaatgcagcaatcttgatcgctagtactgtccggcattatatctgaaacaaatccagatcacccatctcatcacagtcacatgcattcatggtcacgggaaccgttagcaaaccaccaactaatcagcattgcaacactcttcctcctataaatgcagcgagcgggggacaccataaaccatcacaggcacttagcgatcaagttaattttgtttctgctttgtgcgcctgtgttccagtaattactttccgtgtagcaaaa

SEQ ID NO: 504 - DNA, 1108 bp, Setaria italica
  source 1..1108: mol_type = genomic DNA
tatcggcgaccgctaagagaagacatttaaaataagtagtcggcattgtgataaaaagagagcgcgattactgatgtgcaggttctcgattgttgatgaagtcgactagtcggagtcgattctgactagttattgattgtatggaacccgccctcgactagttttctagtcgagacgagtagtcgaagtagaccatcctcaactacttttctagttgagatgagtagtcgaagtagtcgtcggcgacttgattatttgcctcaatctgtgtgtgacttgatcgacgagccgtatgcagcagcttgcggtggaaaccgactcagtcttcgattggaacacggagcgcgtcaattctatgtcgacgtagatttgtctgcttggaactccaactcagtgacttgcttcttgttgagtagattgatcttgatgatgaggtccttcaagctcgcctgatgatctcgacgatcacctctacctgacgcgccaactgttggtgcttagacccagcaacctaccgagggggtacccgaggtagtgttttgtggtggggctcgtcgaagatcaggaacttgaaggtgaactcgaacacacgatttagacaagttcgggctgcttatgccgcataataccccatgtcatgtgtgttggttggattgtattgattgatcagatatttggagggggccctgcctcgccttatattgcccattgccggaggcagggctacaggtcggttgttgtacaagagtactagtcggttttgaccagcgagtcctactctaattgctacaagtagtttcctaatccttgactagtccttgtccgccacgtagaccacgacgtcttgcacctagtctctgtgtttgatacatcttggtgtacagtccgatattgtaggactatccaagcttcccagtaggcccatagatgtatggccgacaactggataatgtaactctgggtcagtactatccttatctatatagacacaaacaacgtactatagcagaagtttaagctcgtaacccaccaatatttggtggcatagaccacgtattgctgatatagtgctcgtaacccaccaatatttcgtggcatagagatctct

SEQ ID NO: 505 - DNA, 1101 bp, Setaria italica
  source 1..1101: mol_type = genomic DNA
tatcggcgaccgctaagagaagacatttaaaataagtagtcggcattgtgataaaaagagagcgcgattactgatgtgcaggttctcgattgttgatgaagtcgactagtcggagtcgattctgactagttattgattgtatggaacccgccctcgactagttttctagtcgagacgagtagtcgaagtagaccatcctcaactacttttctagttgagatgagtagtcgaagtagtcgtcggcgacttgattatttgcctcaatctgtgtgtgacttgatcgacgagccgtatgcagcagcttgcggtggaaaccgactcagtcttcgattggaacacggagcgcgtcaattctatgtcgacgtagatttgtctgcttggaactccaactcagtgacttgcttcttgttgagtagattgatcttgatgatgaggtccttcaagctcgcctgatgatctcgacgatcacctctacctgacgcgccaactgttggtgcttagacccagcaacctaccgagggggtacccgaggtagtgttttgtggtggggctcgtcgaagatcaggaacttgaaggtgaactcgaacacacgatttagacaagttcgggctgcttatgccgcataataccccatgtcatgtgtgttggttggattgtattgattgatcagatatttggagggggccctgcctcgccttatattgcccattgccggaggcagggctacaggtcggttgttgtacaagagtactagtcggttttgaccagcgagtcctactctaattgctacaagtagtttcctaatccttgactagtccttgtccgccacgtagaccacgacgtcttgcacctagtctctgtgtttgatacatcttggtgtacagtccgatattgtaggactatccaagcttcccagtaggcccatagatgtatggccgacaactggataatgtaactctgggtcagtactatccttatctatatagacacaaacaacgtactatagcagaagtttaagctcgtaacccaccaatatttggtggcatagaccacgtattgctgatatagtgctcgtaacccaccaatatttcgtggcataga

SEQ ID NO: 506 - DNA, 609 bp, Setaria italica
  source 1..609: mol_type = genomic DNA
agacccagcaacctaccgagggggtacccgaggtagtgttttgtggtggggctcgtcgaagatcaggaacttgaaggtgaactcgaacacacgatttagacaagttcgggctgcttatgccgcataataccccatgtcatgtgtgttggttggattgtattgattgatcagatatttggagggggccctgcctcgccttatattgcccattgccggaggcagggctacaggtcggttgttgtacaagagtactagtcggttttgaccagcgagtcctactctaattgctacaagtagtttcctaatccttgactagtccttgtccgccacgtagaccacgacgtcttgcacctagtctctgtgtttgatacatcttggtgtacagtccgatattgtaggactatccaagcttcccagtaggcccatagatgtatggccgacaactggataatgtaactctgggtcagtactatccttatctatatagacacaaacaacgtactatagcagaagtttaagctcgtaacccaccaatatttggtggcatagaccacgtattgctgatatagtgctcgtaacccaccaatatttcgtggcatagagatctct

SEQ ID NO: 507 - DNA, 602 bp, Setaria italica
  source 1..602: mol_type = genomic DNA
agacccagcaacctaccgagggggtacccgaggtagtgttttgtggtggggctcgtcgaagatcaggaacttgaaggtgaactcgaacacacgatttagacaagttcgggctgcttatgccgcataataccccatgtcatgtgtgttggttggattgtattgattgatcagatatttggagggggccctgcctcgccttatattgcccattgccggaggcagggctacaggtcggttgttgtacaagagtactagtcggttttgaccagcgagtcctactctaattgctacaagtagtttcctaatccttgactagtccttgtccgccacgtagaccacgacgtcttgcacctagtctctgtgtttgatacatcttggtgtacagtccgatattgtaggactatccaagcttcccagtaggcccatagatgtatggccgacaactggataatgtaactctgggtcagtactatccttatctatatagacacaaacaacgtactatagcagaagtttaagctcgtaacccaccaatatttggtggcatagaccacgtattgctgatatagtgctcgtaacccaccaatatttcgtggcataga

SEQ ID NO: 508 - DNA, 1032 bp, Setaria italica
  source 1..1032: mol_type = genomic DNA
tagagatctcttaggcaataaattagcagtacgaaacaatctatgtccacgtgttgctaatacaatgttctaaaccttacagcctactggacagttctctagccatgatacatgtgcatgtccgaacaaatatttatgggtacccgaaaggttaattttttgtagtatttatgagggggaggggggcgttgacgaaaaaaataacttagctaagcgtaattggcttaaaaacatacaatgttgttccagcatcaagcctacgtgatcatttcacaaaaccaactcaaaagataggtgtcatgttccttttagtgcaaaacttaaggacacctaccttgcaaaacttagctttgttacccagaatgaaccgctaagctcgaggagctctgaacttacatgaccaaatatattaaacacaaaagtcatgcatgattttctttaataagtatcgagcaatatggttcgggtgtctttcgtctcatacctctattgtcctccgtgatcaacaagggtggatccgggtggtgcaagggggctcaagcccccctacctctcccaaaggagaaagaagggagaagaaagtgaaggaagaagaaaccccctatattctaatgctacctccgccactgctgatcaacacaacattcttaaaaccatttccttggcatttgcgcatgttacaaggtacaaaagagccagcccatatgccaagttactaaactaaactatgatccaccatggagcgagaacaaacgtcaacaggcatcaaccaatgcagcaatcttgatcgctagtactgtccggcattatatctgaaacaaatccagatcacccatctcatcacagtcacatgcattcatggtcacgggaaccgttagcaaaccaccaactaatcagcattgcaacactcttcctcctataaatgcagcgagcgggggacaccataaaccatcacaggcacttagcgatcaagttaattttgtttctgctttgtgcgcctgtgttccagtaattactttccgtgtagcaaaa

SEQ ID NO: 509 - DNA, 1630 bp, Setaria italica
  source 1..1630: mol_type = genomic DNA
agacccagcaacctaccgagggggtacccgaggtagtgttttgtggtggggctcgtcgaagatcaggaacttgaaggtgaactcgaacacacgatttagacaagttcgggctgcttatgccgcataataccccatgtcatgtgtgttggttggattgtattgattgatcagatatttggagggggccctgcctcgccttatattgcccattgccggaggcagggctacaggtcggttgttgtacaagagtactagtcggttttgaccagcgagtcctactctaattgctacaagtagtttcctaatccttgactagtccttgtccgccacgtagaccacgacgtcttgcacctagtctctgtgtttgatacatcttggtgtacagtccgatattgtaggactatccaagcttcccagtaggcccatagatgtatggccgacaactggataatgtaactctgggtcagtactatccttatctatatagacacaaacaacgtactatagcagaagtttaagctcgtaacccaccaatatttggtggcatagaccacgtattgctgatatagtgctcgtaacccaccaatatttcgtggcatagagatctcttaggcaataaattagcagtacgaaacaatctatgtccacgtgttgctaatacaatgttctaaaccttacagcctactggacagttctctagccatgatacatgtgcatgtccgaacaaatatttatgggtacccgaaaggttaattttttgtagtatttatgagggggaggggggcgttgacgaaaaaaataacttagctaagcgtaattggcttaaaaacatacaatgttgttccagcatcaagcctacgtgatcatttcacaaaaccaactcaaaagataggtgtcatgttccttttagtgcaaaacttaaggacacctaccttgcaaaacttagctttgttacccagaatgaaccgctaagctcgaggagctctgaacttacatgaccaaatatattaaacacaaaagtcatgcatgattttctttaataagtatcgagcaatatggttcgggtgtctttcgtctcatacctctattgtcctccgtgatcaacaagggtggatccgggtggtgcaagggggctcaagcccccctacctctcccaaaggagaaagaagggagaagaaagtgaaggaagaagaaaccccctatattctaatgctacctccgccactgctgatcaacacaacattcttaaaaccatttccttggcatttgcgcatgttacaaggtacaaaagagccagcccatatgccaagttactaaactaaactatgatccaccatggagcgagaacaaacgtcaacaggcatcaaccaatgcagcaatcttgatcgctagtactgtccggcattatatctgaaacaaatccagatcacccatctcatcacagtcacatgcattcatggtcacgggaaccgttagcaaaccaccaactaatcagcattgcaacactcttcctcctataaatgcagcgagcgggggacaccataaaccatcacaggcacttagcgatcaagttaattttgtttctgctttgtgcgcctgtgttccagtaattactttccgtgtagcaaaa

SEQ ID NO: 510 - DNA, 2129 bp, Setaria italica
  source 1..2129: mol_type = genomic DNA
tatcggcgaccgctaagagaagacatttaaaataagtagtcggcattgtgataaaaagagagcgcgattactgatgtgcaggttctcgattgttgatgaagtcgactagtcggagtcgattctgactagttattgattgtatggaacccgccctcgactagttttctagtcgagacgagtagtcgaagtagaccatcctcaactacttttctagttgagatgagtagtcgaagtagtcgtcggcgacttgattatttgcctcaatctgtgtgtgacttgatcgacgagccgtatgcagcagcttgcggtggaaaccgactcagtcttcgattggaacacggagcgcgtcaattctatgtcgacgtagatttgtctgcttggaactccaactcagtgacttgcttcttgttgagtagattgatcttgatgatgaggtccttcaagctcgcctgatgatctcgacgatcacctctacctgacgcgccaactgttggtgcttagacccagcaacctaccgagggggtacccgaggtagtgttttgtggtggggctcgtcgaagatcaggaacttgaaggtgaactcgaacacacgatttagacaagttcgggctgcttatgccgcataataccccatgtcatgtgtgttggttggattgtattgattgatcagatatttggagggggccctgcctcgccttatattgcccattgccggaggcagggctacaggtcggttgttgtacaagagtactagtcggttttgaccagcgagtcctactctaattgctacaagtagtttcctaatccttgactagtccttgtccgccacgtagaccacgacgtcttgcacctagtctctgtgtttgatacatcttggtgtacagtccgatattgtaggactatccaagcttcccagtaggcccatagatgtatggccgacaactggataatgtaactctgggtcagtactatccttatctatatagacacaaacaacgtactatagcagaagtttaagctcgtaacccaccaatatttggtggcatagaccacgtattgctgatatagtgctcgtaacccaccaatatttcgtggcatagagatctcttaggcaataaattagcagtacgaaacaatctatgtccacgtgttgctaatacaatgttctaaaccttacagcctactggacagttctctagccatgatacatgtgcatgtccgaacaaatatttatgggtacccgaaaggttaattttttgtagtatttatgagggggaggggggcgttgacgaaaaaaataacttagctaagcgtaattggcttaaaaacatacaatgttgttccagcatcaagcctacgtgatcatttcacaaaaccaactcaaaagataggtgtcatgttccttttagtgcaaaacttaaggacacctaccttgcaaaacttagctttgttacccagaatgaaccgctaagctcgaggagctctgaacttacatgaccaaatatattaaacacaaaagtcatgcatgattttctttaataagtatcgagcaatatggttcgggtgtctttcgtctcatacctctattgtcctccgtgatcaacaagggtggatccgggtggtgcaagggggctcaagcccccctacctctcccaaaggagaaagaagggagaagaaagtgaaggaagaagaaaccccctatattctaatgctacctccgccactgctgatcaacacaacattcttaaaaccatttccttggcatttgcgcatgttacaaggtacaaaagagccagcccatatgccaagttactaaactaaactatgatccaccatggagcgagaacaaacgtcaacaggcatcaaccaatgcagcaatcttgatcgctagtactgtccggcattatatctgaaacaaatccagatcacccatctcatcacagtcacatgcattcatggtcacgggaaccgttagcaaaccaccaactaatcagcattgcaacactcttcctcctataaatgcagcgagcgggggacaccataaaccatcacaggcacttagcgatcaagttaattttgtttctgctttgtgcgcctgtgttccagtaattactttccgtgtagcaaaa

SEQ ID NO: 511 - DNA, 1899 bp, Setaria italica; identical to SEQ ID NO: 408
  source 1..1899: mol_type = genomic DNA

SEQ ID NO: 512 - DNA, 1545 bp, Setaria italica
  source 1..1545: mol_type = genomic DNA
gcgcaggggttgggccggaatgggagttgctcggctcatgagaggtttaagggtttctattgatttgagtaagatttgtaatttaaatttgaattggttttcaaaattggctgggatttgagatgtgggctgggatagggtacagaaatgggacttttaaaaggatcctcaagttaggaatatttgactgagatgagatgggaatcctatagggttttggttgctattaatactcaaatggaatttgaatattatttctaggttttgcgagaggaaggatttggaaatttctatttctaaaaggggttctaagggaaacaatcacgtgcaacacatatgctaatattttgtgcaagatttatttataaaaaggttttgaatattcgggaagaaggtatgtgtttagtctaagaaaaaatttaaaaagtacgtattttaaatgctctaaaacgtggacgttacattttatgttgtattcctgttgatgtacatctcacacgtatcaaccgcaattgtattgtacacgttacctcatcaaaaatttatgtgaggaaaccttcaagtgaaaattcataaagagaaaaagagtacaacattaaatcttcttagctatataatattctatatttgctattctttatatgaatagtaatcaatcttcaagctttatacataaacttcatgattcttgcaataaagatctgcatgatctaaataatcaagtggtatagcttcatgttaaaattcaataattaatcaagttgattccttctagatataatttaaaagactttagatctaaacatgattaaagatatgctcccctcctagcgacatcttttgaatgtgttcaaaatgtcttagtcacattcttcataaatgcataagatggaggaaccgcatctttcccgcaatcggccattgctgcgtgctgcatcaacctccatggatccttattgaaaactactctcccgtggcctcttccacgacgtgactctactctcccgtggcctcttcccgcagacgcagaggcctgcagccgtgttgaaacccggcggggaccgtaccactttggcttcgatgtcgccaattcctcgctgtcccgtgctccaggttcactagcagccgcgtgagaaaaactggcggggctcgccgcgccgagaaaaatctcgccacacagctcacgagtcacgacggacaccgagaggccgagaccgcagaggcaaggaaagccgcaagcggcgttggcgagaggcggccaagcggaagctagctgccagcgtggatcgccatcccgccccgtcgtccagaagataaggagcgccgctaggtgccgacacgtcgcgccggacgagataaggataggccagcctggccgggtgacgccaccggcgaacggtgtccactcctgccacatccggccatggagccgctggctatttatatacgccgccggtggagaggagcctctcaagcaagactgcctcttcttctccttcgtaaatacagtactagtaagcgtatactagcactagctagtaagcc

SEQ ID NO: 513 - DNA, 2209 bp, Setaria italica
  source 1..2209: mol_type = genomic DNA
ctataacaccaggagacgtcctggttgaatggacgttgttacacgctcgccttcccactcgttgtgctgaatctcttgctgctgcgcctcgtcgaccttcgaattcggcgtgcaccgggcttgaaggaaagcgggatctccaaaaccactgtcgcgagacctgcatggggcagcaatcagatttttgggcagcgtcttcacgcgaccgcttggtgattctgcaacatccgcttcaacacgttcgactagttctgcgccggatcttgttctagataatatgttgcctgcttacttgtattatttgcttgcatcagtttttatcaatgtgtttttgcttcagataaaatctggaatattttttaggcacatatttccaacaacctacactcagctcgcaagtttaactgatatattgttcacatgcatgatattgttcgttgggagctcactcaaggtaagttgtatggctgcttttatgtttactcaaggtaagttgtatggctgcttttatgttttaagagtcaacactcggcaccaatcaagagcattttcaatctggttctttttttttttttgctaatttgtgatgatctggtttctagggtcaactgacttcttgcatccgcacagtacagtcagcttatattttaggagtatcgcgtcatgtgaatttcggcacaacgtacgacggtgcaatgtgccgttactgtcatccactcatcttttcaacgtcctcgatatacgtgttctatatgattccaaatttaacttttattggtattttgtacctggctgagtaatgcatggtcatgttcttttagctttgttaaatcggcaaagaatgatggagtattaagtactacgaacgaaaggcagcatggccgccacggccgtgcgtgtccgctagcctatggcacccgatacggcctcgctgggtgctgcggcagcgattaggaaatatggaaattaggataagtcaaaaggacgatttccccataagcaagttttttttatcagtggagaaatctatatatatacgattacaaggatgatacacatacacataggcaaatcgtactcacaaccaaaagagtgagccttctatcaaacatctataaataaattgctgaaagtacttgcacgtgcgcaagtcataggcactacgatgtgaaatcgatctagtggtaactacttcctctgatgataaatatatgtaagttcatctttttctaaatcaaacttttatctttgatcattaatatatagtaactcatgtagtagtttgaaaatatgagattaatgtcaacatatttattataatacatttcgataatatagatttttaaaattaaagtgacacaccataagcatggattttatttgtgatcggagaaggaatacaaaatttcgaagtcatcaattagacaaggcaatatacaaccgaataggtataaaatgtactggctattttttttctttttttaaaatatacagtacagacgcatatatacacatgcgctcaccctcaccctatgaatgtatgcctacacaacctacctgtatatgagcatcacgagagactaaaaaattactagtgataatataaatgcgagcacatatatatgcttgtcgtacattgaggcaccctaagatatgatgtggttccccttaataaccctatagaagagatgtcgatcttggctggaaatcttgatcgcaaatgtacatacccaacacatgcacacttgatctgtatgagtatcaattgagattgcgttgacatcacatactccaagcgtcacatggccaggctgatctccaagattattatacagtgatgcacacttgtcaaggtattattagcccgtaacacatgcaaacttgatctgtatgagtgtcaattgagattgcgttgacatcacatgctccaagcgtcccatggccaggctgatctccaagattatacagtgatgcacacttgtcaagctattattagcccgtaacacatgcacacttgatctgtatgagtgtcaattgagattgcgttgacatcacatactccaagcgtcacatggccaggctctccaagattatacagtgatgcgcacttgtccaagctattattagcccgtacgttgcgagcgggcgggtataaaacggaggctggtgagctccttatatcacaccaaagtgcacaagctaacctaag

SEQ ID NO: 514 - DNA, 1030 bp, Setaria italica
  source 1..1030: mol_type = genomic DNA
tagtggtaactacttcctctgatgataaatatatgtaagttcatctttttctaaatcaaacttttatctttgatcattaatatatagtaactcatgtagtagtttgaaaatatgagattaatgtcaacatatttattataatacatttcgataatatagatttttaaaattaaagtgacacaccataagcatggattttatttgtgatcggagaaggaatacaaaatttcgaagtcatcaattagacaaggcaatatacaaccgaataggtataaaatgtactggctattttttttctttttttaaaatatacagtacagacgcatatatacacatgcgctcaccctcaccctatgaatgtatgcctacacaacctacctgtatatgagcatcacgagagactaaaaaattactagtgataatataaatgcgagcacatatatatgcttgtcgtacattgaggcaccctaagatatgatgtggttccccttaataaccctatagaagagatgtcgatcttggctggaaatcttgatcgcaaatgtacatacccaacacatgcacacttgatctgtatgagtatcaattgagattgcgttgacatcacatactccaagcgtcacatggccaggctgatctccaagattattatacagtgatgcacacttgtcaaggtattattagcccgtaacacatgcaaacttgatctgtatgagtgtcaattgagattgcgttgacatcacatgctccaagcgtcccatggccaggctgatctccaagattatacagtgatgcacacttgtcaagctattattagcccgtaacacatgcacacttgatctgtatgagtgtcaattgagattgcgttgacatcacatactccaagcgtcacatggccaggctctccaagattatacagtgatgcgcacttgtccaagctattattagcccgtacgttgcgagcgggcgggtataaaacggaggctggtgagctccttatatcacaccaaagtgcacaagctaacctaag

SEQ ID NO: 515 - DNA, 1443 bp, Setaria italica
  source 1..1443: mol_type = genomic DNA
gttgtttggtagctgggtttagtagagatcaccaacttatctgctattatttctcttatgcatggcacagtactctaagacacaacaataccaatgaaacggaaatgttacattaagctaatattttgtcatatcttaacatcaccgtcacaattaaggggacacatcccagcagatgtcatgtttattttctgcccatggcacccaactggtttagggtgaggtattcaaattcaattttgaaatatccagcacgcttaatgcatattcatctacattatatattaatttcaatacaaaaatattctccaccagaaatttgacactctggatttctgatacatttcaattttttttttcgcagaagccgcatgagcttgcttaatgtttggcatcaggagaagagcataaacaagtctccttttccatagtgcaccgcataagtcagaacgggaaaagctttgaggtagccaaaggattcagcaaatctgccgcagacctcaggagctttccagcgagtataaatgcaccttcaattcacccaccatacttctttcaatatactcgaccctactttatccaaagggttaagcactaataagttaaataacaggcaacttgtttggaacatatattctcctgacctatagcattcccaaacagagagaaaccaggcagtgtggaaatgtctaagtttctcttcaagggaaaatactgtggtgttggtgcatgacaagtcagtgatattgacctatcaacacgaagtcacagtctcatagataatgtcaaacaaaccctgtttcctgcagccaaaatattcttgcaaggattttaatttccgaagtcaaacaaaccttggctcccaaaatattcttgcaaggattttcatttccagatagaaatgtggatgaaagtctagagcaactccccaattttatttttttattttctagaaaatggtattgtgggccatttttcccctcccacctccatctccccagtgatccttatttactgagtacttgctcgtcccagaggggaggtcagagggcagccaatgagggatgaaagttggttggaagaagtagggggacagaaatcctgacaaaggcctaccacatctcccaccccatccctcctcggccctcatttctctcttgcctctgaaaactgaaggcaggacagtctcatagggcatgctcaaaaggacacaagatcttcttggggcacagtagtatatgaaaccacaagagggattcgacttaccactgtcggagaagactaacaaggaaggaagcaaaggcctaccatatggtatttatatatgccccttctctggtcctttcttgaacatgtcacacatggacgcgtgctaacatgcatgtgtgaacctatctcagtagctcattaatctctctttgcagcttagctctgctcactctc

SEQ ID NO: 516 - DNA, 1365 bp, Setaria italica
  source 1..1365: mol_type = genomic DNA
aaaaattttgttgtttggtagctgggtttagtagagatcaccaacttatctgctattatttctcttatgcatggcacagtactctaagacacaacaataccaatgaaacggaaatgttacattaagctaatattttgtcatatcttaacatcaccgtcacaattaaggggacacatcccagcagatgtcatgtttattttctgcccatggcacccaactggtttagggtgaggtattcaaattcaattttgaaatatccagcacgcttaatgcatattcatctacattatatattaatttcaatacaaaaatattctccaccagaaatttgacactctggatttctgatacatttcaattttttttttcgcagaagccgcatgagcttgcttaatgtttggcatcaggagaagagcataaacaagtctccttttccatagtgcaccgcataagtcagaacgggaaaagctttgaggtagccaaaggattcagcaaatctgccgcagacctcaggagctttccagcgagtataaatgcaccttcaattcacccaccatacttctttcaatatactcgaccctactttatccaaagggttaagcactaataagttaaataacaggcaacttgtttggaacatatattctcctgacctatagcattcccaaacagagagaaaccaggcagtgtggaaatgtctaagtttctcttcaagggaaaatactgtggtgttggtgcatgacaagtcagtgatattgacctatcaacacgaagtcacagtctcatagataatgtcaaacaaaccctgtttcctgcagccaaaatattcttgcaaggattttaatttccgaagtcaaacaaaccttggctcccaaaatattcttgcaaggattttcatttccagatagaaatgtggatgaaagtctagagcaactccccaattttatttttttattttctagaaaatggtattgtgggccatttttcccctcccacctccatctccccagtgatccttatttactgagtacttgctcgtcccagaggggaggtcagagggcagccaatgagggatgaaagttggttggaagaagtagggggacagaaatcctgacaaaggcctaccacatctcccaccccatccctcctcggccctcatttctctcttgcctctgaaaactgaaggcaggacagtctcatagggcatgctcaaaaggacacaagatcttcttggggcacagtagtatatgaaaccacaagagggattcgacttaccactgtcggagaagactaacaaggaaggaagcaaaggcctaccatatggtatttatatatgccccttctctggtcctttcttgaacatgt

SEQ ID NO: 517 - DNA, 1356 bp, Setaria italica
  source 1..1356: mol_type = genomic DNA
gttgtttggtagctgggtttagtagagatcaccaacttatctgctattatttctcttatgcatggcacagtactctaagacacaacaataccaatgaaacggaaatgttacattaagctaatattttgtcatatcttaacatcaccgtcacaattaaggggacacatcccagcagatgtcatgtttattttctgcccatggcacccaactggtttagggtgaggtattcaaattcaattttgaaatatccagcacgcttaatgcatattcatctacattatatattaatttcaatacaaaaatattctccaccagaaatttgacactctggatttctgatacatttcaattttttttttcgcagaagccgcatgagcttgcttaatgtttggcatcaggagaagagcataaacaagtctccttttccatagtgcaccgcataagtcagaacgggaaaagctttgaggtagccaaaggattcagcaaatctgccgcagacctcaggagctttccagcgagtataaatgcaccttcaattcacccaccatacttctttcaatatactcgaccctactttatccaaagggttaagcactaataagttaaataacaggcaacttgtttggaacatatattctcctgacctatagcattcccaaacagagagaaaccaggcagtgtggaaatgtctaagtttctcttcaagggaaaatactgtggtgttggtgcatgacaagtcagtgatattgacctatcaacacgaagtcacagtctcatagataatgtcaaacaaaccctgtttcctgcagccaaaatattcttgcaaggattttaatttccgaagtcaaacaaaccttggctcccaaaatattcttgcaaggattttcatttccagatagaaatgtggatgaaagtctagagcaactccccaattttatttttttattttctagaaaatggtattgtgggccatttttcccctcccacctccatctccccagtgatccttatttactgagtacttgctcgtcccagaggggaggtcagagggcagccaatgagggatgaaagttggttggaagaagtagggggacagaaatcctgacaaaggcctaccacatctcccaccccatccctcctcggccctcatttctctcttgcctctgaaaactgaaggcaggacagtctcatagggcatgctcaaaaggacacaagatcttcttggggcacagtagtatatgaaaccacaagagggattcgacttaccactgtcggagaagactaacaaggaaggaagcaaaggcctaccatatggtatttatatatgccccttctctggtcctttcttgaacatgt

SEQ ID NO: 518 - DNA, 910 bp, Setaria italica
  source 1..910: mol_type = genomic DNA
tgtactgtcatattgtcgtggtttttcaattgctgtacctgatgcaaacgtaatgggtttactaatcttgcacccgccggcttcaaaatgaagagtgctaatttggtccacgtcaccatcaccggttcgaactgtctagaatggcaggcaaagatgattggacaggcatgcagggaaaaagagcaccgttgacgatgtatgcgagttcccaccattgcgagcaatgattatcagccacacgacttactcttcagagctaaccactgccatgcagagaaaaagtgaatcatattgtcatgatctacaacgaagtgaaacaatcaggcatgctaaagtgctgaaactttactgatctctcatgttggacaacaaagaatacgggaatacatcagcaacgcaactcttgagctttgcttgccgaatgaccagctagaatttccaagcatttacagaaacatgactttaagtttcagaaaaacaaatacaaggccactaaataagcgtggggataacatatcctccagatgacaggcaatctgcaacttgcagccattcaaatgtacgattaacaaaatatttaagcgccacatgagataatatatcctccaattagggcctttagtattgtcattagctcataaccatggtgcatcctcacatggacgctgcataagaagttcataatagcaacagacatatgaacaaagcatggtgcgcctgcccggccggactagctagtactaccaatcatggaataagctagtaccctaaatgaaattaaaatggtttttagcgattatccacgccgtccagaatactctaatccacaagttgaggccgcccatgaagccgcgagagggcgacgccatgtgtataaaaggggcctaagctgagtggacttgctgcatca

SEQ ID NO: 519 - DNA, 127 bp, Setaria italica
  source 1..127: mol_type = genomic DNA
tagcgattatccacgccgtccagaatactctaatccacaagttgaggccgcccatgaagccgcgagagggcgacgccatgtgtataaaaggggcctaagctgagtggacttgctgcatcagattagt

SEQ ID NO: 520 - DNA, 2130 bp, Setaria italica
  source 1..2130: mol_type = genomic DNA
atcgttgtttgtttaagcttttgacttttcacgctgagaaactgtcaggaagctcaaacaaacacagcctatacagtgattctgtaccaatcaaaccactcacaactcaccaatgtacctgtttattttccaaatcaaccattgctgtggggcttgtgggttatgacttatgagtatgagcagtattttcccccctggaatgcaagtggcagatagcttctgagatctaccatgcaccctggtaaagctcctaccattttatttgcaatagtagatgcatataattgatggacacagagttctgaaccgtgagattttctttaacttcagagttctgtcactatgttaacgtggatctggagttttgcaggaactgtgaagaaggaaccgtacctaaaactaaaagtctcacgaagaccaaatgggcaagccagacagtcagagagacagggcttcttcggccaactggacaagggatgtgccatcatgtgctgagagattaccaaatccgcaatttgcagacgtgccttctcaatcagtttgcacaaagcgataaggtaaacaaccattggagcattgttaacagcagcctagcatggcaggatgcgtcatctgaataatgcggagggcaggacagtaggacaggacacctaatccctgcaaattctagtggctctgggacactgatcatggcccaaaagtgctaaccactgcattactaaaacgtgtgggtgttgcgagttccaagttggctgttgtcatggaatggtatgaaaatgcaaaagattctcgttgttttgttgagagttagtaaattgggatgacttcggcatgacaacagcacaaaccttacatatttggtaagacttgcaacaaaaatcaaaagaatgctagtagataccaacaaaaagaaaaaacagagctagcatgaacacttctttgatcacagttgatcaaaggtgtatggccctcagacaaagctgttgatgatggtcaaacacttttgctaccgaatatcgcagttgtcctttggtacattcacaagtttgatcttatcatcaccatcagaagttcagaaagtctcgatgaaaacaaatggaaatgaatactgcttacttagctcaaattcatattccgttgttacaggatacttaaaaaaggtaccaaaggctgttcctaatcatacgctgaagtcgttgccaccaatggcagctgtactgtcatattgtcgtggtttttcaattgctgtacctgatgcaaacgtaatgggtttactaatcttgcacccgccgacttcaaaatgaagagtgctaatttggtccacgtcaccatcaccggttcgaactgtctagaatggcaggcaaagatgattggacaggcatgcagggaaaaagagcaccgatgacgatgtatgcgagttcccaccattgcgagcaatgattatcagccacacgacttactcttcagagctaaccactgccatgcagagaaaaagtgaatcatattgtcatgatctacaacgaagtgaaacaatcaggcatgctaaagtgctgaaactttactgatctctcatgttggacaacaaagaatacgggaatacatcagcaacgcaactcttgagctttgcttgctgaatgaccagctagaatttccaagcatttacagaaacatgactttaagtttcagaaaaacaaatacaaggccactaaataagcgtggggataacatatcctccagatgacaggcaatctgcaacttgcagccattcaaatgtacgattaacaaaatatttaagcgctacatgagataatatatcctccaattagggcctttagtattgtcattagctcataaccatggtgcatcctcacatggacgctgcataagaagttcataatagcaacagacatatgaacaaagcatggtgcgcctgcccggccggactagctagtactaccaatcatggaataagctagtaccctaaatgaaattaaaatggtttttagcgattatccacgccgtccagaatactctaatccacaagttgaggccgcccatgaagccgcgagagggcgacgccatgtgtataaaaggggcctaagctgagtggacttgctgcatcagattagt

SEQ ID NO: 521 - DNA, 943 bp, Setaria italica
  source 1..943: mol_type = genomic DNA
ctgaagtcgttgccaccaatggcagctgtactgtcatattgtcgtggtttttcaattgctgtacctgatgcaaacgtaatgggtttactaatcttgcacccgccgacttcaaaatgaagagtgctaatttggtccacgtcaccatcaccggttcgaactgtctagaatggcaggcaaagatgattggacaggcatgcagggaaaaagagcaccgatgacgatgtatgcgagttcccaccattgcgagcaatgattatcagccacacgacttactcttcagagctaaccactgccatgcagagaaaaagtgaatcatattgtcatgatctacaacgaagtgaaacaatcaggcatgctaaagtgctgaaactttactgatctctcatgttggacaacaaagaatacgggaatacatcagcaacgcaactcttgagctttgcttgctgaatgaccagctagaatttccaagcatttacagaaacatgactttaagtttcagaaaaacaaatacaaggccactaaataagcgtggggataacatatcctccagatgacaggcaatctgcaacttgcagccattcaaatgtacgattaacaaaatatttaagcgctacatgagataatatatcctccaattagggcctttagtattgtcattagctcataaccatggtgcatcctcacatggacgctgcataagaagttcataatagcaacagacatatgaacaaagcatggtgcgcctgcccggccggactagctagtactaccaatcatggaataagctagtaccctaaatgaaattaaaatggtttttagcgattatccacgccgtccagaatactctaatccacaagttgaggccgcccatgaagccgcgagagggcgacgccatgtgtataaaaggggcctaagctgagtggacttgctgcatcagattagt

SEQ ID NO: 522 - DNA, 1501 bp, Setaria italica
  source 1..1501: mol_type = genomic DNA
caggacagtaggacaggacacctaatccctgcaaattctagtggctctgggacactgatcatggcccaaaagtgctaaccactgcattactaaaacgtgtgggtgttgcgagttccaagttggctgttgtcatggaatggtatgaaaatgcaaaagattctcgttgttttgttgagagttagtaaattgggatgacttcggcatgacaacagcacaaaccttacatatttggtaagacttgcaacaaaaatcaaaagaatgctagtagataccaacaaaaagaaaaaacagagctagcatgaacacttctttgatcacagttgatcaaaggtgtatggccctcagacaaagctgttgatgatggtcaaacacttttgctaccgaatatcgcagttgtcctttggtacattcacaagtttgatcttatcatcaccatcagaagttcagaaagtctcgatgaaaacaaatggaaatgaatactgcttacttagctcaaattcatattccgttgttacaggatacttaaaaaaggtaccaaaggctgttcctaatcatacgctgaagtcgttgccaccaatggcagctgtactgtcatattgtcgtggtttttcaattgctgtacctgatgcaaacgtaatgggtttactaatcttgcacccgccgacttcaaaatgaagagtgctaatttggtccacgtcaccatcaccggttcgaactgtctagaatggcaggcaaagatgattggacaggcatgcagggaaaaagagcaccgatgacgatgtatgcgagttcccaccattgcgagcaatgattatcagccacacgacttactcttcagagctaaccactgccatgcagagaaaaagtgaatcatattgtcatgatctacaacgaagtgaaacaatcaggcatgctaaagtgctgaaactttactgatctctcatgttggacaacaaagaatacgggaatacatcagcaacgcaactcttgagctttgcttgctgaatgaccagctagaatttccaagcatttacagaaacatgactttaagtttcagaaaaacaaatacaaggccactaaataagcgtggggataacatatcctccagatgacaggcaatctgcaacttgcagccattcaaatgtacgattaacaaaatatttaagcgctacatgagataatatatcctccaattagggcctttagtattgtcattagctcataaccatggtgcatcctcacatggacgctgcataagaagttcataatagcaacagacatatgaacaaagcatggtgcgcctgcccggccggactagctagtactaccaatcatggaataagctagtaccctaaatgaaattaaaatggtttttagcgattatccacgccgtccagaatactctaatccacaagttgaggccgcccatgaagccgcgagagggcgacgccatgtgtataaaaggggcctaagctgagtggacttgctgcatcagattagt

SEQ ID NO: 523 - DNA, 723 bp, Setaria italica
  source 1..723: mol_type = genomic DNA
ttcaatttcactggagatcgttccaccagagaaatcaccgtcggagtcattttaggatgaaaggcccaaaagcctaaatggcaggcctaccccagaggcccaagcgatcaagggtagctccgtactttcccgcgacggtgcgatacacggttcgaaatttcaaaattcgaacgggcggccaaacagccgttccttccatttccctgccgtcctcacaaaggctccccttccatccaccgaagtgaaaactaccccgactcaatgactcatgggctgggcagttcactttcatattccagtcccacatgtcagtgtcacgtcttcacgggcgcatgtgaagatcgccgagaacgagaggcgccggctccgcgggacccgccgccagctcaaacccaccgttgccggccgctgatcacgcaagcctcgccccgacgttcgaaaccaaacggccgttaacctccgctgcccccgcgcggcttcggccccgttcaccaacgaggcgggccaccaccacgccgtctaacgcgagccaaacggcggttaggtcacggcctcaccctcacgggccggccgcggccgcctcccctctcctctcgcgctgcctataaaagccgccgcggccgcctcccctctcctcacctcggcgtcttcacaaacgccagcgctccccttccactcccgatcgatcgccgctccgctccctcttccctcgcctccgcctcc

SEQ ID NO: 524 - DNA, 1067 bp, Setaria italica
  source 1..1067: mol_type = genomic DNA
aaacgtctccaattgtttgagctactactagctctgaccaggactaaagttagcttctccattggttagagacacgctctataactatctcttattgctattagtgcttgcatatgtatgagaacatggtgatagttgacatgcatggccccttttcagacaatagtggaaggggaacttgaggaccgacgatgagaattggttgatttcactaaaaattggtcacttattcttctttcttcctatttcgagatggaaaaaatattccactaaccactgactccagtgagagagatcactggaagccaggacatactcctagacaaaaagtttgcagaaaatatggcccaacgagcaaagagcggcccgtagatccactgcgtcggcccatcggcccaaccgaaccggccacatgcgggcagacgagacgaacactcgcagaagggagatccgcagaagatccgagcaacagcccagcgcaacggcagccgatactgttctcccgcttccccatttcaaaattcgaaaatatcaggcgacaacagacgaggcggaaccacccggccaaatcggccgccgcgccgcgcgtcccacctcactcacctaaaattgggtcccacctcacgtatggcccattggcaagtgagacgtcgcctctgatgcggttttccgccccgcacccaacgtgaggtgaacgggccaccaaccggttttcctagagctacacaacttggcctcacccaaccgtgtacacgctcaaaccgtacaaaaaagtttctcgggcccggttgacagacgatagccgcggtgggttgccggctaaacacaggtaccaacaaaaagcaagctaatttcctaacattttccttctagatcctctagcttatccttttttcctaccaggacaagacagcttgaaccagatcacccggtctggcacacaccacgcccacggcccacccgaccgttgcgaccgggaggagcccgaaccgtgcaaacaactaaactccagtggcttggatgaaaagggcgcccgtccctccctcccttcacctgcactccatcga

SEQ ID NO: 525 - DNA, 1060 bp, Setaria italica
  source 1..1060: mol_type = genomic DNA
tccaattgtttgagctactactagctctgaccaggactaaagttagcttctccattggttagagacacgctctataactatctcttattgctattagtgcttgcatatgtatgagaacatggtgatagttgacatgcatggccccttttcagacaatagtggaaggggaacttgaggaccgacgatgagaattggttgatttcactaaaaattggtcacttattcttctttcttcctatttcgagatggaaaaaatattccactaaccactgactccagtgagagagatcactggaagccaggacatactcctagacaaaaagtttgcagaaaatatggcccaacgagcaaagagcggcccgtagatccactgcgtcggcccatcggcccaaccgaaccggccacatgcgggcagacgagacgaacactcgcagaagggagatccgcagaagatccgagcaacagcccagcgcaacggcagccgatactgttctcccgcttccccatttcaaaattcgaaaatatcaggcgacaacagacgaggcggaaccacccggccaaatcggccgccgcgccgcgcgtcccacctcactcacctaaaattgggtcccacctcacgtatggcccattggcaagtgagacgtcgcctctgatgcggttttccgccccgcacccaacgtgaggtgaacgggccaccaaccggttttcctagagctacacaacttggcctcacccaaccgtgtacacgctcaaaccgtacaaaaaagtttctcgggcccggttgacagacgatagccgcggtgggttgccggctaaacacaggtaccaacaaaaagcaagctaatttcctaacattttccttctagatcctctagcttatccttttttcctaccaggacaagacagcttgaaccagatcacccggtctggcacacaccacgcccacggcccacccgaccgttgcgaccgggaggagcccgaaccgtgcaaacaactaaactccagtggcttggatgaaaagggcgcccgtccctccctcccttcacctgcactccatcga

SEQ ID NO: 526 - DNA, 1593 bp, Setaria italica
  source 1..1593: mol_type = genomic DNA
tagcgtagcaggctagcagcctgaactctcgggtgattctgtggcgagttagcttgctcgctgcctgcaatggagtgaatattggcagtacgaagtcacacgggcaggcagagatttggaacatggtggaaacaagaaccatcggcatcgttcttctgatcaatatagtgattactggaagaatcaagaacagaataaaaccaaggcatcctggatctaccatgtcaatctttgctttcatcctcgtcgtttggagcgagcctgttcttgtttgaggcgcgctcgaccgtgccacgaagtaacaggtgcatgaggtctgcagtctgcactagaacttcccagctcccaaattcaacgaaactgaaaaaagtcattggtaacatcaaagtcttgtcttaggatagctgctgttcttgacgctggttagatttgtccaataaattacatgaccagcgcacatgtacttggtattcgacttgatgatttgtatgtactgacggacttgaataaagtarggggaattaggactcagaagtctacgatttttggtccaatatttgattgtgatgttcaaagtcgacgtctctttcgagacgaaattgtgatgcgtagaacaaaaacgacgcaatttcttttcaaaagaaaaagattaggggcagaacaattcaggatctgtttggctggacttataagccggctgaaaagctgaaacggttgatttattgtgagagaaaaacactgtttggtggctgataagctgaaacgaacaggctgtcagtcattaggctgccggctctggaacagtgcgccatcaagagatcacccgaaccatgttgagctcatcaacgtgcgccgctgttgtgctcattggtgtcgcggtcgtggctggcgcgcatctttcgttgcgtcttgtcatggattatccacgacggcagtgtcctgttgtttatgatgacggcacttgattcgccatggatggtgaaaacgaaatcgaagtgcggtcattttttattttaccagatgacgtggttggtgacctgagaggaacagacatgagaagatgagatcagcagctcaattcccacattgacagacgacctttggagcagtacaagagacccaaatgaagaatagtgcaaattacagagtatattagaacacgagaattattaagttttactcgaggtcaatgaaagaatttaggactattcagagcacaggctgtgttcaagtcctgcatgaaccagagaaagttcccaccaaggcctccatcagaggaacgaatttgcctggaactccatcactcaccagtcaccactcaccacttaccagcctaataaagcgtagcagacaatttggagtagacgatcatcatgtgcagtctcataggccctcttctaggaataaccgtatttgatagccaatccacctatgtggtgatttttttttcctttgtccatcggggtcgctttccatccgacgtgtctgcagtgtagcgcaatccatctgtcgctttctgctttctgatgaacgttccggttgacgccgctaagctgccttgtcctccttttctcccgtctgcacagggagggg

SEQ ID NO: 527 - DNA, 856 bp, Setaria italica
  source 1..856: mol_type = genomic DNA
actgtttggtggctgataagctgaaacgaacaggctgtcagtcattaggctgccggctctggaacagtgcgccatcaagagatcacccgaaccatgttgagctcatcaacgtgcgccgctgttgtgctcattggtgtcgcggtcgtggctggcgcgcatctttcgttgcgtcttgtcatggattatccacgacggcagtgtcctgttgtttatgatgacggcacttgattcgccatggatggtgaaaacgaaatcgaagtgcggtcattttttattttaccagatgacgtggttggtgacctgagaggaacagacatgagaagatgagatcagcagctcaattcccatattgacagacgacctttggagcagtacaagagacccaaatgaagaatagtgcaaattacagagtatattagaacacgagaattattaagttttactcgaggtcaatgaaagaatttaggactattcagagcacaggctgtgttcaagtcctgcatgaaccagagaaagttcccaccaaggcctccatcagaggaacgaatttgcctggaactccatcactcaccagtcaccactcaccacttaccagcctaataaagcgtagcagacaatttggagtagacgatcatcatgtgcagtctcataggccctcttctaggaataaccgtatttgatagccaatccacctatgtggtgatttttttttcctttgtccatcggggtcgctttccatccgacgtgtctgcagtgtagcgcaatccatctgtcgctttctgctttctgatgaacgttccggttgacgccgctaagctgccttgtcctccttttctcccgtctgcacagggagggg

SEQ ID NO: 528 - DNA, 1011 bp, Setaria italica
  source 1..1011: mol_type = genomic DNA
atcgtgcttaggaagaataccggacggctggcagtaacaaatcatacagtatttgccttctataaaggcagctggagactgttctccgaaataaatcatagcaacttaggagtgtttgatacgaggcgctaaacttcagcaggtcatatcggatgttcggatactaattataaaagtcaacacgagctaattacaaaactaattgcacagatggagtctaattcgcaagacgaatctattaaggggctgtttggatacgaggtgctaaactttaacagtgtcacgtcggatgttcggatgctaattaggaggactaaacatgagctaattgtaaaactaattgcagaaccctgtgctaattcgctagacgaatctattaagcctaattaatccatcattagcaaatggttactgtagcaccatattgtcaaatcagggactaattaggtttagtagattcgtctcgcgaattatactccatctgtgcaattacttttttaattagtctatgtttaatactcctaattagtatccaaacatccgatgtgacaggtgttaaactttaacagggcgttcccaaacacccccctaaagctaattaatccatcgttaacaaatagttattgtagcacaacattgtcaaatcatggactaattaggcttaatagattcatctcgcgaattagactccatctgtacaattaattttataattagactatatttaatacctccaattagtatcaaatattcgatgtgacatgtgctaaagtttagtagggtatccaaacaccccttctctcctttcctcttggtatgtttagcagttacccctggctcttggcatccgtttcgtcgacgtgccatggtttaacggacgggacggggacggccggctcacgtgaacaacgcccacgaggccgcgctggctcttgtaaaagcaaccgctccctccctagacgctagtgcctctttcctctctcctccgcccctttttatcgcccgatctca

SEQ ID NO: 529 - DNA, 1047 bp, Setaria italica
  source 1..1047: mol_type = genomic DNA
actatagggcacgcgtggtcgacggcccgggctggtatcgtgcttaggaagaataccggacggctggcagtaacaaatcatacagtatttgccttctataaaggcagctggagactgttctccgaaataaatcatagcaacttaggagtgtttgatacgaggcgctaaacttcagcaggtcatatcggatgttcggatactaattataaaagtcaacacgagctaattacaaaactaattgcacagatggagtctaattcgcaagacgaatctattaaggggctgtttggatacgaggtgctaaactttaacagtgtcacgtcggatgttcggatgctaattaggaggactaaacatgagctaattgtaaaactaattgcagaaccctgtgctaattcgctagacgaatctattaagcctaattaatccatcattagcaaatggttactgtagcaccatattgtcaaatcagggactaattaggtttagtagattcgtctcgcgaattatactccatctgtgcaattacttttttaattagtctatgtttaatactcctaattagtatccaaacatccgatgtgacaggtgttaaactttaacagggcgttcccaaacacccccctaaagctaattaatccatcgttaacaaatagttattgtagcacaacattgtcaaatcatggactaattaggcttaatagattcatctcgcgaattagactccatctgtacaattaattttataattagactatatttaatacctccaattagtatcaaatattcgatgtgacatgtgctaaagtttagtagggtatccaaacaccccttctctcctttcctcttggtatgtttagcagttacccctggctcttggcatccgtttcgtcgacgtgccatggtttaacggacgggacggggacggccggctcacgtgaacaacgcccacgaggccgcgctggctcttgtaaaagcaaccgctccctccctagacgctagtgcctctttcctctctcctccgcccctttttatcgcccgatctca

SEQ ID NO: 530 - DNA, 269 bp, Setaria italica
  source 1..269: mol_type = genomic DNA
aacctccgctgcccccgcgcggcttcggccccgttcaccaacgaggcgggccaccaccacgccgtctaacgcgagccaaacggcggttaggtcacggcctcaccctcacgggccggccgcggccgcctcccctctcctctcgcgctgcctataaaagccgccgcggccgcctcccctctcctcacctcggcgtcttcacaaacgccagcgctccccttccactcccgatcgatcgccgctccgctccctcttccctcgcctccgcctcc

SEQ ID NO: 531 - DNA, 723 bp, Setaria italica; identical to SEQ ID NO: 523
  source 1..723: mol_type = genomic DNA

SEQ ID NO: 532 - DNA, 1034 bp, Setaria italica
  source 1..1034: mol_type = genomic DNA
gccgtttttgaagtatccaggattagaagcttctactgcgcttttatattatagctgtggacctgtggtaacctttctcttttggcgcttgcttaatctcggccgtgctggtccatgcttaggcactaggcagagatagagccgggggtgaatggggctaaagctcagctgctcgaggggccgtgggctggtttccactagcctacagctgtgccacgtgcggccgcgcaagccgaagcaagcacgctgagccgttggacagcttgtcataatgccattacgtggattacacgtaactggccctgtaactactcgttcggccatcatcaaacgacgacgtccgctaggcgacgacacgggtaatgcacgcagccacccaggcgcgcgcgctagcggagcacggtcaggtgacacgggcgtcgtgacgcttccgagttgaaggggttaacgccagaaacagtgtttggccagggtatgaacataacaaaaaatattcacacgaaagaatggaagtatggagctgctactgtgtaaatgccaagcaggaaactcacgcccgctaacatccaacggccaacagctcgacgtgccggtcagcagagcatcggaacactggtgattggtggagccggcagtatgcgccccagcacggccgaggtggtggtggcccgtggccctgctgtctgcgcggctcgggacaacttgaaactgggccaccgcctcgtcgcaactcgcaacccgttggcggaagaaaggaatggctcgtaggggcccgggtagaatcgaagaatgttgcgctgggcttcgattcacataacatgggcctgaagctctaaaacgacggcccggtcgccgcgcgatggaaagagaccggatcctcctcgtgaattctggaaggccacacgagagcgacccaccaccgacgcggaggagtcgtgcgtggtccaacacggccggcgggctgggctgcgaccttaaccagcaaggcacgccacgacccgccccgccctcgaggcataaataccctcccatcc

SEQ ID NO: 533 - DNA, 850 bp, Setaria italica
  unsure 558: note = unsure at all n locations
  source 1..850: mol_type = genomic DNA
cgggcgggtctgtgcccgtgcggccgcgcaagccgaagcaagcacgctgagccgttggacagcttgtcataatgccattacgtggattacacgtaactggccctgtaactactcgttcggccatcatcaaacgacgacgtccgctaggcgacgacacgggtaatgcacgcagccacccaggcgcgcgcgctagcggagcacggtcaggtgacacgggcgtcgtgacgcttccgagttgaaggggttaacgccagaaacagtgtttggccagggtatgaacataacaaaaaatattcacacgaaagaatggaagtatggagctgctactgtgtaaatgccaagcaggaaactcacgcccgctaacatccaacggccaacagctcgacgtgccggtcagcagagcatcggaacactggtgattggtggagccggcagtatgcgccccagcacggccgaggtggtggtggcccgtggccctgctgtctgcgcggctcgggacaacttgaaactgggccaccgcctcgtcgcaactcgcaacccgttggcggaagaaaggantggctcgtaggggcccgggtagaatcgaagaatgttgcgctgggcttcgattcacataacatgggcctgaagctctaaaacgacggcccggtcgccgcgcgatggaaagagaccggatcctcctcgtgaattctggaaggccacacgagagcgacccaccaccgacgcggaggagtcgtgcgtggtccaacacggccggcgggctgggctgcgaccttaaccagcaaggcacgccacgacccgccccgccctcgaggcataaataccctcccatcccgatgccgcaagactc

SEQ ID NO: 534 - DNA, 2215 bp, Setaria italica
  source 1..2215: mol_type = genomic DNA
gttccatatatagagattggagtaaaaaataaaaaatagcatatttctatatgttatagtctattgttggtggatgtgaaaacaaaacatcttgcacaaggtgtccaggagccccaccgtcatgggtcaacgcggagagctggtatgaagcaacggtacaaaaacagtgctattggctaggagatgaatacagtttagggtagctgctgggtaagggactaaagggtatgggttactttactgaacctcaagtgcttgtcagcacctcggctcgtcgttgcaatgcaagctgtgcctgtgaccgggtcgcctgaaaggcaaggcaaaccacatgctatgatggctgctgcgccgagaaaggaggtagctggttgggaatttgataactgagtcagttaagtgtaatgggtaacttctctctttttctgatgaaatctcctcattatgatctcatcaagtcagcaattttgctgatgtggtaataaattaatacgcatgaaactcctatgaaactaaagttataaccactctcacatgcacataaataaacacacatattggatccatagccacactgtaggttatttacaagcattggagtaacaatgtgcatcgatctagagcacagttttctcattgcatcgatcactcgatcatcacccgtggcatttcctaatagtggctactccaatatactattatgtataacaactactaccgtgtgattgaggtgaggaatcttgctgccccacacaaaagccaatccctaccgtctcttggctggagttgacggtacacggaagccaatgccaataatgccaatgcagcgccactcccacgcatcatcagaactacaacgcgctagttatgtttgcgccaatgatttcattggcgtacgtgcttattatcctgtggttagggcctatttagttgcctgattttggacaaccaaaatcactatgccagcactgtagcatattgtagcgtttcgtttatatttgtgaattattgtccaaatattgactaattaggctcaaaagattcgtcttgcaaaatacaacaaaactgtgcaattagtttttgatttcgtctacattcagtactccatgcatgtactgtaagtttgatgtgatggggaatcttcttttttacatagtgtcaaagttaggattttagggtaactaaacaatgccttagttgatgacaaactggcttcagaattactacacattggatccattactaagatgcatgttatccagatgtatataaatatcatttcaaccaataaaagttgagatgcagacatgcatatatagtggtctctagaagaagaatatatgtatatgtatgacagtagaaggtgtcaatgtatacagacatgtcaatagaacctgatgaccaaggtgtgatgagttccctttcgattgattagtatttgcagagatgggatgatgcttccattcaatgtaaacgcctaatgaatataaacggcaatctaaagcaacttctatatatcctacaagtgtttagaatagttaacaataagctactagctagctcgtggaagccatgaacacaggttagcttgctgccggacttttgggtctccccaattagcctccacactaacgtggagacctgtaaacaaacattagtttatgcgcagccaaccgacgatcgatgatggattggaaaagaataatgtgaatgtgtatgtaaactaagtaagatggtgtgtatgcaggccacaatcattgttaatcactgttgctttggttcggtttggttcacatgacgattaagcaaatgcacatggccatccgtgaataatctccgttgtatgctgcaaggaagagatagagcagtaaggacattgccattttatctgcaatacgcaggtaccgggtcgacggcaagaacagggtagttgagtgagtccctccctcccaacagctaccttggcttggggttgctgcgactgcgagcgcggtcaaaagaattgccgcgtcccccgtctgtccggccaccaaccccggccgtcaaccatgcctgcatgatctgtcagtcactacagtactattattccagcaggcgtaggctctgacgacacgaccgccaccttccatgcatcccggcgacttctctgctccactccattccatccatccatccatctatataagctagccaggccacccggtgtgcaggagcc

SEQ ID NO: 535 - DNA, 1030 bp, Setaria italica
  source 1..1030: mol_type = genomic DNA
acaatgccttagttgatgacaaactggcttcagaattactacacattggatccattactaagatgcatgttatccagatgtatataaatatcatttcaaccaataaaagttgagatgcagacatgcatatatagtggtctctagaagaagaatatatgtatatgtatgacagtagaaggtgtcaatgtatacagacatgtcaatagaacctgatgaccaaggtgtgatgagttccctttcgattgattagtatttgcagagatgggatgatgcttccattcaatgtaaacgcctaatgaatataaacggcaatctaaagcaacttctatatatcctacaagtgtttagaatagttaacaataagctactagctagctcgtggaagccatgaacacaggttagcttgctgccggacttttgggtctccccaattagcctccacactaacgtggagacctgtaaacaaacattagtttatgcgcagccaaccgacgatcgatgatggattggaaaagaataatgtgaatgtgtatgtaaactaagtaagatggtgtgtatgcaggccacaatcattgttaatcactgttgctttggttcggtttggttcacatgacgattaagcaaatgcacatggccatccgtgaataatctccgttgtatgctgcaaggaagagatagagcagtaaggacattgccattttatctgcaatacgcaggtaccgggtcgacggcaagaacagggtagttgagtgagtccctccctcccaacagctaccttggcttggggttgctgcgactgcgagcgcggtcaaaagaattgccgcgtcccccgtctgtccggccaccaaccccggccgtcaaccatgcctgcatgatctgtcagtcactacagtactattattccagcaggcgtaggctctgacgacacgaccgccaccttccatgcatcccggcgacttctctgctccactccattccatccatccatccatctatataagctagccaggccacccggtgtgcaggagcc

SEQ ID NO: 536 - DNA, 2258 bp, Setaria italica
  source 1..2258: mol_type = genomic DNA
ttgaagcatatagaatgtacaaaatgataatccagtaaacattgttccatatatagagattggagtaaaaaataaaaaatagcatatttctatatgttatagtctattgttggtggatgtgaaaacaaaacatcttgcacaaggtgtccaggagccccaccgtcatgggtcaacgcggagagctggtatgaagcaacggtacaaaaacagtgctattggctaggagatgaatacagtttagggtagctgctgggtaagggactaaagggtatgggttactttactgaacctcaagtgcttgtcagcacctcggctcgtcgttgcaatgcaagctgtgcctgtgaccgggtcgcctgaaaggcaaggcaaaccacatgctatgatggctgctgcgccgagaaaggaggtagctggttgggaatttgataactgagtcagttaagtgtaatgggtaacttctctctttttctgatgaaatctcctcattatgatctcatcaagtcagcaattttgctgatgtggtaataaattaatacgcatgaaactcctatgaaactaaagttataaccactctcacatgcacataaataaacacacatattggatccatagccacactgtaggttatttacaagcattggagtaacaatgtgcatcgatctagagcacagttttctcattgcatcgatcactcgatcatcacccgtggcatttcctaatagtggctactccaatatactattatgtataacaactactaccgtgtgattgaggtgaggaatcttgctgccccacacaaaagccaatccctaccgtctcttggctggagttgacggtacacggaagccaatgccaataatgccaatgcagcgccactcccacgcatcatcagaactacaacgcgctagttatgtttgcgccaatgatttcattggcgtacgtgcttattatcctgtggttagggcctatttagttgcctgattttggacaaccaaaatcactatgccagcactgtagcatattgtagcgtttcgtttatatttgtgaattattgtccaaatattgactaattaggctcaaaagattcgtcttgcaaaatacaacaaaactgtgcaattagtttttgatttcgtctacattcagtactccatgcatgtactgtaagtttgatgtgatggggaatcttcttttttacatagtgtcaaagttaggattttagggtaactaaacaatgccttagttgatgacaaactggcttcagaattactacacattggatccattactaagatgcatgttatccagatgtatataaatatcatttcaaccaataaaagttgagatgcagacatgcatatatagtggtctctagaagaagaatatatgtatatgtatgacagtagaaggtgtcaatgtatacagacatgtcaatagaacctgatgaccaaggtgtgatgagttccctttcgattgattagtatttgcagagatgggatgatgcttccattcaatgtaaacgcctaatgaatataaacggcaatctaaagcaacttctatatatcctacaagtgtttagaatagttaacaataagctactagctagctcgtggaagccatgaacacaggttagcttgctgccggacttttgggtctccccaattagcctccacactaacgtggagacctgtaaacaaacattagtttatgcgcagccaaccgacgatcgatgatggattggaaaagaataatgtgaatgtgtatgtaaactaagtaagatggtgtgtatgcaggccacaatcattgttaatcactgttgctttggttcggtttggttcacatgacgattaagcaaatgcacatggccatccgtgaataatctccgttgtatgctgcaaggaagagatagagcagtaaggacattgccattttatctgcaatacgcaggtaccgggtcgacggcaagaacagggtagttgagtgagtccctccctcccaacagctaccttggcttggggttgctgcgactgcgagcgcggtcaaaagaattgccgcgtcccccgtctgtccggccaccaaccccggccgtcaaccatgcctgcatgatctgtcagtcactacagtactattattccagcaggcgtaggctctgacgacacgaccgccaccttccatgcatcccggcgacttctctgctccactccattccatccatccatccatctatataagctagccaggccacccggtgtgcaggagcc

SEQ ID NO: 537 - DNA, 49 bp, Setaria italica
  source 1..49: mol_type = genomic DNA
tgtatttccttgaccgttcagattgggagtggtcgtttccacgatagat

SEQ ID NO: 538 - DNA, 109 bp, Setaria italica
  source 1..109: mol_type = genomic DNA
acggagcgcgccgccatccagatccagccgccggaactccgccccctccgccgtcggccccgtccgctccgaccggtcggcttctcccttgctgaacaactgaccagaa

SEQ ID NO: 539 - DNA, 110 bp, Setaria italica
  source 1..110: mol_type = genomic DNA
gcttcgccctctcctctcctctcctctcctccccactcttcccccccgccgcgagctcgccgcccgctccccacctcctcgccgcggatcctccactactccggtagaaa

SEQ ID NO: 540 - DNA, 109 bp, Setaria italica; identical to SEQ ID NO: 538
  source 1..109: mol_type = genomic DNA

SEQ ID NO: 541 - DNA, 110 bp, Setaria italica; identical to SEQ ID NO: 539
  source 1..110: mol_type = genomic DNA

SEQ ID NO: 542 - DNA, 77 bp, Setaria italica; identical to SEQ ID NO: 109
  source 1..77: mol_type = genomic DNA

SEQ ID NO: 543 - DNA, 34 bp, Setaria italica
  source 1..34: mol_type = genomic DNA
cgtctccccgtcacctcaggatcagcaagcggca

SEQ ID NO: 544 - DNA, 201 bp, Setaria italica
  source 1..201: mol_type = genomic DNA
cgaaggttaggaataatggtgccgagagcaatcaggcaacacacaccaaccctgctaaactcccgggcctcccagctcataaatagagtatcgctgcgaggccgagcagtgggcgaccctgtgagcttagctagcaagcaatcaagcactgccacctgaacctcacggagaaagttaaggcggcgagagacagagagatcc

SEQ ID NO: 545 - DNA, 201 bp, Setaria italica
  source 1..201: mol_type = genomic DNA
cgaaggttaggaataatagtgccgagagcaatcaggcaacacacaccaaccctgctaaactcccgggcctcccagctcataaatagagtatcgctgcgaggccgagcagtgggcgaccctgtgagcttagctagcaagcaatcaagcactgccacctgaacctcacggagaaagttaaggcggcgagagacagagagatcc

SEQ ID NO: 546 - DNA, 158 bp, Setaria italica
  source 1..158: mol_type = genomic DNA
cgaaggttaggaataatggtgccgagagcaatcaggcaacacacaccaaccctgctaaactcccgggcctcccagctcataaatagagtatcgctgcgaggccgagcagtgggcgaccctgtgagcttagctagcaagcaatcaagcactgccacctg

SEQ ID NO: 547 - DNA, 12 bp, Setaria italica
  source 1..12: mol_type = genomic DNA
cacccatcagca

SEQ ID NO: 548 - DNA, 56 bp, Setaria italica
  source 1..56: mol_type = genomic DNA
accaccaccacctgacgctctcagcacacccaggaggaggaggaggagcagcagcc

SEQ ID NO: 549 - DNA, 37 bp, Setaria italica
  source 1..37: mol_type = genomic DNA
cctgacgctctcagcacacccaggaggaggaggagga

SEQ ID NO: 550 - DNA, 46 bp, Setaria italica
  source 1..46: mol_type = genomic DNA
acaggaacgggattcttccttcttctggccattagctccaagatct

SEQ ID NO: 551 - DNA, 40 bp, Setaria italica
  source 1..40: mol_type = genomic DNA
acaggaacgggattcttccttcttctggccattagctcca

SEQ ID NO: 552 - DNA, 72 bp, Setaria italica
  source 1..72: mol_type = genomic DNA
ggtctacacgcacccacccaatccatcgtcccagctgcaaagcgcgcaagaacactccaaagcagctgagct

SEQ ID NO: 553 - DNA, 72 bp, Setaria italica; identical to SEQ ID NO: 115
  source 1..72: mol_type = genomic DNA

SEQ ID NO: 554 - DNA, 70 bp, Setaria italica; identical to SEQ ID NO: 132
  source 1..70: mol_type = genomic DNA

SEQ ID NO: 555 - DNA, 10 bp, Setaria italica
  source 1..10: mol_type = genomic DNA
ccaccgccgg

SEQ ID NO: 556 - DNA, 76 bp, Setaria italica
  source 1..76: mol_type = genomic DNA
ccaccgccggctcagtttcgtctggctgccttagcatcggcgccatccggcagcagctagcttagcgcgcgacgac

SEQ ID NO: 557 - DNA, 34 bp, Setaria italica
  source 1..34: mol_type = genomic DNA
ctctcctaaactgccccgcacatccctgccagca

SEQ ID NO: 558 - DNA, 33 bp, Setaria italica
  source 1..33: mol_type = genomic DNA
ctctcctaaactgccccgcacatccctgccagc

SEQ ID NO: 559 - DNA, 36 bp, Setaria italica
  source 1..36: mol_type = genomic DNA
gcgagtttctgaggttctgtcgtgtagtaacacagg

SEQ ID NO: 560 - DNA, 72 bp, Setaria italica
  source 1..72: mol_type = genomic DNA
cactgagcgagtacttggcaggccgatcagctcgttgatagcaagctcactcgtcagtaagtagcaatcagg

SEQ ID NO: 561 - DNA, 32 bp, Setaria italica
  source 1..32: mol_type = genomic DNA
gcgcacaaaacaacagataggattgaacaaca

SEQ ID NO: 562 - DNA, 67 bp, Setaria italica
  source 1..67: mol_type = genomic DNA
gctcaagcaatctcaaagaacttgtcttctccatccacaccgagtttttcggcttcttgacttgaag

SEQ ID NO: 563 - DNA, 66 bp, Setaria italica
  source 1..66: mol_type = genomic DNA
gctcaagcaatctcaaagaacttgtcttctccatccacaccgagtttttcggcttcttgacttgaa

SEQ ID NO: 564 - DNA, 63 bp, Setaria italica
  source 1..63: mol_type = genomic DNA
aatctcaaagaacttgtcttctccatccacaccgagtttttcggcttcttgacttgaagatct

SEQ ID NO: 565 - DNA, 58 bp, Setaria italica
  source 1..58: mol_type = genomic DNA
aatctcaaagaacttgtcttctccatccacaccgagtttttcggcttcttgacttgaa

SEQ ID NO: 566 - DNA, 101 bp, Setaria italica
  source 1..101: mol_type = genomic DNA
cgcattcccctctctctacgcagctcggctccactccgctccgaagagggaggaggacgcccgctgccacgctacccgctcccccggaactcgccgccacc

SEQ ID NO: 567 - DNA, 38 bp, Setaria italica
  source 1..38: mol_type = genomic DNA
cgcattcccctctctctacgcagctcggctccactccg

SEQ ID NO: 568 - DNA, 103 bp, Setaria italica
  source 1..103: mol_type = genomic DNA
cgcaccaataccaagcctctcccgggccagcttctagcattggctcatcaccagcactccagcaggcaggcaaaacgcaagcaacacctctccgccagacatc

SEQ ID NO: 569 - DNA, 67 bp, Setaria italica
  source 1..67: mol_type = genomic DNA
cgcaccaataccaagcctctcccgggccagcttctagcattggctcatcaccagcactccagcaggc

SEQ ID NO: 570 - DNA, 104 bp, Setaria italica
  source 1..104: mol_type = genomic DNA
acgcaccaataccaagcctctcccgggccagcttctagcattggctcatcaccagcactccagcaggcaggcaaaacgcaagcaacacctctccgccagacatc

SEQ ID NO: 571 - DNA, 208 bp, Setaria italica
  source 1..208: mol_type = genomic DNA
gggccgcgagcaaagtcaactgctcgacacctcctcggccaacgtgcctatatattctcggctagccgcgtccgtactcatccaacccaactccaaacacctcatcagattcctcgcctccgtctccgaccacccaccagtcaggtaactagctagagaggaagagatcaccggccggcgatcgattattaacgcgtcaggagaagcg

SEQ ID NO: 572 - DNA, 32 bp, Setaria italica; identical to SEQ ID NO: 561
  source 1..32: mol_type = genomic DNA

SEQ ID NO: 573 - DNA, 74 bp, Setaria italica
  source 1..74: mol_type = genomic DNA
ctagcaagtcagcagcagcaagcaaacacacagcgttcgtgagctcttccgagcttgcattggtgtaagcaagg

SEQ ID NO: 574 - DNA, 61 bp, Setaria italica; identical to SEQ ID NO: 153
  source 1..61: mol_type = genomic DNA

SEQ ID NO: 575 - DNA, 59 bp, Setaria italica
  source 1..59: mol_type = genomic DNA
cgccacagccatctagctccactccagtcatctagcttcgcttcgcttcccaccacgcc

SEQ ID NO: 576 - DNA, 57 bp, Setaria italica
  source 1..57: mol_type = genomic DNA
ccgccacagccatctagctccactccagtcatctagcttcgcttcgcttcccaccac

SEQ ID NO: 577 - DNA, 63 bp, Setaria italica
  source 1..63: mol_type = genomic DNA
ccaccgccacagccatctagctccactccagtcatctagcttcgcttcgcttcccaccacgcc

SEQ ID NO: 578 - DNA, 73 bp, Setaria italica
  source 1..73: mol_type = genomic DNA
cgcgcgctcccgccgcacacaccagaccctccttcctcatcagaggcaaacacaagcgcgtgcgaggggaagg

SEQ ID NO: 579 - DNA, 41 bp, Setaria italica
  source 1..41: mol_type = genomic DNA
cgctcccgccgcacacaccagaccctccttcctcatcagag

SEQ ID NO: 580 - DNA, 57 bp, Setaria italica
  source 1..57: mol_type = genomic DNA
tcaccaaattcatctcactaacacctccatttttattgtgatagtacccgaatacca

SEQ ID NO: 581 - DNA, 82 bp, Setaria italica
  source 1..82: mol_type = genomic DNA
aagcaagttacccagcttgcttgcgagtgtgagcagctagctagctagcagagtgatcgagcgttggtgagctgagctggga

SEQ ID NO: 582 - DNA, 61 bp, Setaria italica; identical to SEQ ID NO: 153
  source 1..61: mol_type = genomic DNA

SEQ ID NO: 583 - DNA, 79 bp, Setaria italica
  source 1..79: mol_type = genomic DNA
acaggcacttagcgatcaagttaattttgtttctgctttgtgcgcctgtgttccagtaattactttccgtgtagcaaaa

SEQ ID NO: 584 - DNA, 87 bp, Setaria italica
  source 1..87: mol_type = genomic DNA
cacacatggacgcgtgctaacatgcatgtgtgaacctatctcagtagctcattaatctctctttgcagcttagctctgctcactctc

SEQ ID NO: 585 - DNA, 75 bp, Setaria italica
  source 1..75: mol_type = genomic DNA
gattagtaagcaatctcaagcgcagagagccaaagctttcggtgtagctcgaagagcaaagcgaaggcaagatct

SEQ ID NO: 586 - DNA, 63 bp, Setaria italica
  source 1..63: mol_type = genomic DNA
aagcaatctcaagcgcagagagccaaagctttcggtgtagctcgaagagcaaagcgaaggcaa

SEQ ID NO: 587 - DNA, 176 bp, Setaria italica
  source 1..176: mol_type = genomic DNA
ggcccaggctgtcgcctcgatctatataagcgagtgggaggagacgcgaaccctaagccgagcaccgcagaggaaggcgtcttcgtactcgcctctctcgcgactcaaagctttccccgtcctcccattccctaccgccgccgccgtcgccgccgcaccacccttccgacgacacc

SEQ ID NO: 588 - DNA, 89 bp, Setaria italica
  source 1..89: mol_type = genomic DNA
ggcccaggctgtcgcctcgatctatataagcgagtgggaggagacgcgaaccctaagccgagcaccgcagaggaaggcgtcttcgtact

SEQ ID NO: 589 - DNA, 141 bp, Setaria italica
  source 1..141: mol_type = genomic DNA
gctcaggttatttgcttgtactgcattcgcactcctaatgttaaattttgttggatggggcattatatttttcatatgcccaattcatcattcagtgtattgtgttgctaatactttttctgccaaacctttcaggatatt

SEQ ID NO: 590 - DNA, 555 bp, Setaria italica
  source 1..555: mol_type = genomic DNA
aagcaggtttgatttctagatccactacatgaaccgtgtactgcttttcattggccatttcaatccttatgaaaatatgaactgaatgcgagctatgtggatttatgggcctgaggatattatgcatttcacagttcaacacaactgttgtgaataatttgggttgagtttaatcaaaactagtgcaatacatcaggaatttgtttatagacaatatgagcaactaaaggtgtggtagatctgaactaacggtgaagacaggtgatagtgcatcatgatcaactaaatgccatttgtaaacttcttaatacatttaagcaaaatttagatcaagtgcctaatgatgagccagaagaataagtgcaagcaactaacaatgcattactctgttgagttaattttcttgatccagttaaggtttgccattgagtggaccctcctttccctccttaatctttttgtgaactcgggccgttcctttcctatttagtagagctatataccagtcttaaatattcgtggtcgcttattctgccttgattgctccaggctttt

SEQ ID NO: 591 - DNA, 104 bp, Setaria italica
  source 1..104: mol_type = genomic DNA
atcacggtatctccatcctagcatatttccacttaagtcctttttattttctggagtcatcgtgtatatatattcaaattccatttgcttggctctaggaggat

SEQ ID NO: 592 - DNA, 120 bp, Setaria italica
  source 1..120: mol_type = genomic DNA
gcccaggttagatatctaacgaaaacaaacctaatttttttgtgtacatgttaatggattgatcatatatcttgtaaattgggattgattgttggtgttgcctttgtgttgtaggatatg

SEQ ID NO: 593 - DNA, 1012 bp, Setaria italica
  source 1..1012: mol_type = genomic DNA
aagcaggtctgcttctgctccctctgcctccctttactgtgcatggcatgtgaggtttcactgtatgagataatgtgttctagatttgcattgttggacacttggctgagcacataaatgcttttatcacctttttactttgttgaagacaggatttcctttgtttagtagaatatgatatcaaggaaataatttgtagctgctgatatatgaagtcatagattcatagatgctaacctttcttttaaaagacaatcaaggttgcaaggaaaacacagcaagtctgtgacatatatgctgtcagagtcttttatagccaatcaccggcttttgaatcatagtggtgtatactgaagtaatttgcatggcatgacaaattttgcaagacctgaactgtcggaatactattagcaaggtttagtgctattagcaaaaaagaaaaggcttagtgcatataatctgtgctagtttttgttcatgcgtaatcacggaaacggtacctcttactattaagtgtaacaagttctagtagaggcactgtttactttgaagtggcaacaatgtttcatatctcctcattttatgtttcaagttcgtgttcctgtttcatatttcaccccatttgtttattgcattttccatttatattcttaatctgtgaaatctaagatgcttaactgtctttgctgttggttctccactgaaattgacatgtcttgctgcatacatttctactttatattactaaattacaaccaaatggtgaaaattaacttagttatgctattacaaaactgtttattactgacagatggtctagaatacataaggcaccacatatgcataaccagctgtttctaattctaatttgtggaatttgctatgtttgtccaaaactgagacaatctcaattctcaactacattgcatcgaagtacgcttgatgttatgatatttttacttcacattttatttgctggagttgacttggaatttaatgtctgtaggctttt

SEQ ID NO: 594 - DNA, 105 bp, Setaria italica
  source 1..105: mol_type = genomic DNA
accaatgtgagtttcctaattgtctttttaatctatttaaccttcttagttctctttgccatggttctcatctgaccttgttctctccttcaacttcaggaggat

SEQ ID NO: 595 - DNA, 163 bp, Setaria italica
  source 1..163: mol_type = genomic DNA
gctcaggtttgttcattttttctgttctgataatatgacaactgtctctattcatctagtataggatgacaagttcatttctttgaatgcttagttgcttactgttagtctttacactgttttcttatgaagttttattctgctatgtattgtgtaggacatt

SEQ ID NO: 596 - DNA, 682 bp, Setaria italica
  source 1..682: mol_type = genomic DNA
aagcaggttggaatcacatctacttttctactacatacattcgttttactgtgtttagggtgggttgttcgtgcatttgagcttgggcagaaaaaatatatccaaaagtgccttttaactgtaaattttaggatccttgtcctaattgttgagtatatcaggagctttctattgcttctcatacagcaaactaaacacttgtaggttcatgttgcaatttgactactagatatcttgatcactgtgtatcagatcagatagtttctgattagtaatgctacctctgatatgatgatagttctggtaatgctaccactgatatgatgagcttttgatcttccatgtttgcacatatctaaacaggcttgcttgtagtggttttgtgccattctgccctgttattgctagactcttgcttgttattatcctccttgttaaaagaattcttaatgttctactggattgtggtgatacttgtaatatctggcacctacattatcaaggtgataataatgctgtgtgttttacagttttgagtatctaatgccacttaattaatttgtggtaactgggaggcatttgagtcggttgcctgatcatttaactttttaattgtgacttagtccttatgccattgaaactttgataactgataacgattggctaatctttgcaggcgttt

SEQ ID NO: 597 - DNA, 105 bp, Setaria italica
  source 1..105: mol_type = genomic DNA
ctcacggtaatttcttctcccaaaataaacctaatctttaatctgttgcctgtctactcttcctatctgttgctaaaaatttgaatttggtatgtgcaggaggat

SEQ ID NO: 598 - DNA, 1370 bp, Setaria italica
  source 1..1370: mol_type = genomic DNA
caggaggttagggttaccgatttgcctgtcccttctctcgagaaattaatcctgcgtgctgtcctgctgcttgatctcgttgtgcttcgtgttcgtggtacgctagatgcgtgggagtgccgcgaattttattcgatttttttgggggcgatgttctggcatgcggctagatccgctcgtctcgggcgttactgggtgggtttgcttggtctcgatctgcgagatctgaggcggggcgcgtagatccgtccgatttggcagtagtttggtgtgaggaccgaggaccttttgggttccccttctgtggtgagcggcttgtgtatgttggagggagtaaacggaggggatggaatgtggaatttctttagtcgaatgcgttcgtttatctgaatggttagcgtatacctggatatttgatctggatgcaggcgtactctgcaactagggtatctaagggtagtgcggtttgttgcagggaggtgttggggttgaattttctgttgatgaactattatgtgtgggattcgctagggatacaaaacctgttggtctgtgctgaaaatgtggtaggattaaatcattagatatctctgtggttagatctggctggcccatttcagtgatctgttagtctgtgatgtaaatagttcgtgtatgacttggatatgacatggattcttttaggtggtgtttggttggctcaaatgtaacgcaattcgattaccgaatgtaatgaatcacgttacagatgtttggttgtggtggtttgtaatcaattgacgctaattgaatcccttgcctatacaatacctatacaagcttgttacccctcctcccccactgtaattaacacccacgccgtaatctgattacgttactagagtgcaaccaaacaaagagggtaatcacccattccgccaccgaatacactaatctgattccctttgcgtttatgttaccttagcacgaaccaaacactatcttagtctcttgcatcatatcataatgtgttgacggtttgtttgattcaaatggatttggtattgtggaattatattgattattagtttgcttggagtcatatattactattttgaaccgcggattttttgtgctagcaccttgtgttagattagctgatgcctccttgtgtgactgtttgtcactggttgaatcagatttgtgtgaccctatcttgttgcttagaaatgtttagtcacattcttattttagcaaacatgagtgaaatgaatgacttgttgatttttatggccagcatgcacattttctgtatacctgagtaattttgtttagtttctactggcttttggcagcgactttatcagtttattttgttgttacagtaagcc

SEQ ID NO: 599 - DNA, 142 bp, Setaria italica
  source 1..142: mol_type = genomic DNA
gctcaggtatgttcattttgctgctgggatgatagagtggtcactatattttcatgtcataaaagatgcccagttcatttgagtgcctagcgacactcttttcttagcaaactctaatctgctatgtaatgtgtaggatatt

SEQ ID NO: 600 - DNA, 600 bp, Setaria italica
  source 1..600: mol_type = genomic DNA
aagcaggttggtatcacatctaccattctgttacatccattttgctctgtttatggtgcagactgtttgtggtgcactggaacctgaactcaagaatggaaccaaaagtacccttttaactgaaaattgtaggttccttattgtccttggctgtttagtataactggaggtcttgattgctcgtcatatgctagaccttttctctttttcacagttaggttcgtcaactaaaccatcttgaacccaatgtatcagatcagataatttctgattagtaatgttaatttttagttttcatatgatagcttgccctcttagctagctacatactacaattgaatttgcatgcttttagtgattgtgtcattctgtattctgctgtcattgctggactgattatcattggctctgttctgtgggattatgatgagacttgttgtatctggtgctcacattatcaaatgataatgattgtaactacaattcgtttactttgtccaagtaattggctgtcttgtgtgggttaccttaccagttaccagcttaagtctgtcattgcaagataattgatgctgatctactaatcctcttcaggcattt

SEQ ID NO: 601 - DNA, 601 bp, Setaria italica
  source 1..601: mol_type = genomic DNA
aagcaggttggtatcacatctaccattctgttacatccattttgctctgtttatggtgcagactgtttgtggtgcactggaacctgaactcaagaatggaaccaaaagtacccttttaactgaaaattgtaggttccttattgtccttggctgtttagtataactggaggtcttgattgctcgtcatatgctagaaccttttctctttttcacagttaggttcgtcaactaaaccatcttgaacccaatgtatcagatcagataatttctgattagtaatgttaatttttagttttcatatgatagcttgccctcttagctagctacatactacaattgaatttgcatgcttttagtgattgtgtcattctgtattctgctgtcattgctggactgattatcattggctctgttctgtgggattatgatgagacttgttgtatctggtgctcacattatcaaatgataatgattgtaactacaattcgtttactttgtccaagtaattggctgtcttgtgtgggttaccttaccagttaccagcttaagtctgtcattgcaagataattgatgctgatctactaatcctcttcaggcattt

SEQ ID NO: 602 - DNA, 99 bp, Setaria italica
  source 1..99: mol_type = genomic DNA
ctcacggtatttccttcccttccaagcttcatcatttgtcgcttatcgtctgctcaccttgaggtgctaaaaatcttaaattgctctctgcaggaggat

SEQ ID NO: 603 - DNA, 164 bp, Setaria italica
  source 1..164: mol_type = genomic DNA
gctcaggttggtccatgttgtcacttccataacctgcttgcatttgattgttatttctgtgatagtattcttccatcatttccaagtgaccattgtttttcacttgttgactactggactgatatactcttaatgtgacttgccatgcaaatgtataggatatt

SEQ ID NO: 604 - DNA, 522 bp, Setaria italica
  source 1..522: mol_type = genomic DNA
aagcaggtaggtattgcatttatctttcgatttgtcgtacaagtttctgagttgttattatcttgtttcatttgtttgaatctagtctggaataaaacatgcaaaattgcacttgttatgtcttccatagttcatcagaacagatggctcatgttggctttagtttgagttggattgtgatgtcctgtttgagtgcaacagttgtgcatcttgtctatggtgacataattacatattgcatgttcggtacagtgcttgttcttcatacgttggtatgataggcatttggcgcttatttgctacgcatactaatctaggaagcagtaaaaaccttgctagcagtagtagtagttctcttcatcatacatttcttaatattgttttttctataatgagctatcgagctagaagaattgcatagtattttcccctgattgagaagactgaattagtagaacagtttattttctaggtgttacaaatgcatgatacaacatgacatactattctttgcaggcattt

SEQ ID NO: 605 - DNA, 127 bp, Setaria italica
  source 1..127: mol_type = genomic DNA
ctcacggtatctccgcactgccaaacttgagcttgtctaaatgaatgattgatgcctactcctggagtatggtgctgaggagtataaatctggatgtataatatgaatttctcggtggcaggaggat

SEQ ID NO: 606 - DNA, 1152 bp, Setaria italica
  source 1..1152: mol_type = genomic DNA
cgggaggttagggttcccgatttatccagctttcttttttgattgagaaattaatcttgcgtgctgtcaagagtgctgtcctgcttgatctagttgcgtgttgcgtgttcgtggtacgggagatacgggagtgcggcgggagtgcggcgagttttctccgccttttttcttcttctgttttttttcgggtggcgttctgcgatgcggctagatccgctttgtctcgggtgctggtccgtgggtttgttcgagctcgatccacgagatctgaggcttggagcgcacggggggcgtagatccgcctgatttgggaatagtttgatgcgaggactgaatgctgatcacctcccgggtttccgttcccattttggggttagcaaccgtgcctgttatctgttggaggcttggagcggggacacggatggttgaatgtagaatttctggagtgaagtagcttgttcagatatttgatctggatgtacacgtgccttcacggttagtagtgtattaaagggtagctctatctgttgctgctaggtgttggatgtgatttctcgatttatgtactgttcggtgtgtcggattttgggtcatgtttcacctgtttaaggaattatggttgggtaacctgttgatctggggttttgaatgatgatgaattgctgttgaattaaataattcattaatgataaccttgtcaaggatagatccggttggtccttttcagtgatctgtttggcagtagtttaaataggttagttctgtctgattgcttaatttgatggatttggggatcacaacagaatgaacagatcatattacctgcattgtgtggggtctgttattgcgatttttgaacctgaacgtgggtgctgtaagctagtgttcgattagatggtgctgcttggtgtggctgtattgcttttttgagaatggtgtggctttattgctggttcaatcaggtttgtatgaccctttcatatttctcagaaatgttattaataagcttgctcttaccaaacatggaggggcttaatggcttaagtcgagtttagtggccagccatgtacctttaccatgtagtcattttagttgatatcttgtacctttttgaggcaatggcttatcagttcccttttgttgcagtaagtt

SEQ ID NO: 607 - DNA, 818 bp, Setaria italica
  source 1..818: mol_type = genomic DNA
gccgaggtacagtccagattcccgtctatcgatagttggaatgtcaccatctagatcaacttgctctgttttttcccctattttcttggtagcttgtagcgcagatgtgcgttatcacttatcaggttggtttaggtagatggtttcctgcccgtatttgtttcagcccccggactctgatttagccgagttgcatgaaggattcataaatattgctggaatctgaatgaatatgactgactggctgactgctccctagatacctgtagcttgtcaaagaaagaaactgaaaaacaattcggcatgtggaattagctgacgtgctacattacacaattctgcagcttttggtgagataggtggctgatcttactgcatggtgattccatttatgttaataccgttttatattttttaggatgatagtggctcaaagtctttttccttactttggatcatttgcaattgttgacagtagggtgcatttcgtttctatggatgctacattcatttatggtaatactgtttaataattttgaggaattcatttgatcacatgtagatttttaggatgatagtggctcaaaatcgttctccttacttttggatcatttgtaattgtcaaagtagagctgcaaaaacatgtgtttgctgctatttgaatgtttaattcatcaatcagtaatttatgcaggctagtattttctgaagagttacaacgtgatgtgtattttgataagaggacaatttcatagttgataaatgccttcaaagctcttttggttcagaggttaactttggttgaactttagtgtcag

SEQ ID NO: 608 - DNA, 84 bp, Setaria italica
  source 1..84: mol_type = genomic DNA
gcccaggttagaccctttgaattgctcagttgtctgtttactctttgaaattctagagtctaattttccgtgctgcaggcattc

SEQ ID NO: 609 - DNA, 103 bp, Setaria italica
  source 1..103: mol_type = genomic DNA
agcagtgtgtgtatcttctgccttgcttatgtttttgaactttgggtgcatttggtgtaatctaatttgaataaattcttttcattgttttgtgcaggcagat

SEQ ID NO: 610 - DNA, 1166 bp, Setaria italica
  source 1..1166: mol_type = genomic DNA
gggaaggtgcgaaaatgatctacagttttgcatttacataatatacttcttgaagcatatgtcatatgtgctatgcccagtagcttcaatatttttaaagctcttgtcctgagaactggattgctcaaaactattggaaacaaatctgacaagtgacaagctgcttgtttgtgttgagtgttggttgttgtagctttaacaacaaactgcttaacatatatgagtcttcctctaaagagagctattactcctagatttaaacttgtgagttttagacttggatgcatgaatcaaggacatagatgaaaatgagtttgttaccctacagttattcccttgtaggaaaagatactttatttatttatgacagtgatagcattcattcagcaagggcgtaaggtgtgaaaaagagagagaaaatgtgtctaaaagctttatgacttatatttagagaaaagttgagaagatctaccataaaggcaattggtgggaatagtaacttttagttgattggctgtacaccttccttgtggaagatagaaaacggtactcaatttacattatcctcataatgaacatgttgactagaaaaatgactgtatttgaaatgtagatggataaaatttactcagacctgtgcagtctgggacactagtgcttggttagtttgctgggtttttttccacgtatgatagatcatctgtagctcttctgcaattaagtcatattttggacatagtgagcacatttgtatctgtattactcaatgtgtataggatttccctgataatagatactgggaattgagtaaaattgttttattttttcaaaatacatcaagcatgtattttgttctaaaacatgacctttggtgagtgattaggcatgcatatttatttgaaaccttgtttattgtattatgggcatttgtaggaactgaacctgaagggcattttattttatttagcaccttgctagtttttaagagatgtttttatttatttagtccagagtttctactaatccttaggcttcaagttggtatgtagcattataaatgattgagaatgattactttttacagttgtattgttatatttcctgttaatgcttgatcagctgtcatgacttcatttttactctgtgctaatttgatttaggatgtt

SEQ ID NO: 611 - DNA, 159 bp, Setaria italica
  source 1..159: mol_type = genomic DNA
gctcaggtgagcagagctccaatccctctcctatcttctcccgtctcgtcgcttcatctggctgttttcttatcttggaactgatgctctgtgtgtgtgattggggatgcttctccggtgtctgatgtatttgcgctcgttgatgcctcgcaggctttc

SEQ ID NO: 612 - DNA, 92 bp, Setaria italica
  source 1..92: mol_type = genomic DNA
tgctatgtaagccgccggtatcttcctataatcacttgtgagatttagttgcctgtggtgtgaccttcggtggtgatgctttgcagccagat

SEQ ID NO: 613 - DNA, 564 bp, Setaria italica
  source 1..564: mol_type = genomic DNA
ggcaaggtgaatttcgcttgttttgttgtgctattgtggtgcatagcttgtaatgttcagttactgactatgcttgaataattttaatgggcctagagatcgtgcatgaggttacttgcatcataagtagtagatgtatcattagtaaggaatgcggcactgaatataccatcatcatgcatggcttgaattttgaacagttcagttacagtatatcctttttaatccatcgagtatctgaattgagtgacagatgaagaatcaatgctgtttgtgtaggctatattatcatccagtaattgtttgagtactccttcctagaaatttgcagaatttcttcttggcccgggttatcttttcagtgcttgtgatgttaatacatgttactttagtatttgctttgtgttttgagttgttattccatacgtcgattttggtgccatggcatatagagtggaaacttttggctaagtgatactgtttggtgtgctcctctataattgtatacaggtttccaataattgaacataatttgatcattctttttgcttgacttaggatgtt

SEQ ID NO: 614 - DNA, 564 bp, Setaria italica; identical to SEQ ID NO: 613
  source 1..564: mol_type = genomic DNA

SEQ ID NO: 615 - DNA, 142 bp, Setaria italica
  source 1..142: mol_type = genomic DNA
caccaggtagcgagccatccgcctgtcctctcctcttctgctgctgatccgctttcaaatccccgttggatttgttccgcggtgttgacatcaccgcctcgcctcatctttgccgcgtttgttttcctgtctacaggtggat

SEQ ID NO: 616 - DNA, 286 bp, Setaria italica
  source 1..286: mol_type = genomic DNA
catgaggtacctacccaccaccaatctttgtgcccccgttcttcctctccagttttttcttgttggatcgtccatttgtcacttgatcaccctggatcttcttggatcatgattgaaattattaatattcagtatcacccttgtccgtcacttctgaattccatctgtcgcttctgatagagtgatagttgctgttcagttgccccgttagtcttgcacacaccacatccacttcatctctgacacactgtactcattttgactgcgctctgctttgcagtaagtt

SEQ ID NO: 617 - DNA, 747 bp, Setaria italica
  source 1..747: mol_type = genomic DNA
gaggaggtacttatgatgatgctgttcttccatccttttccttgagcaaaatgtcgttgctattggattgtgattctcaaactgtggtagaaccttcttagcatgcagttgactattgtgaaatgagactgaccatcttactgcattttgatatccagatacatgctacaaaacatgtacattgtttgaaatttgatcccaaacctttgaactgaatatatgctgtcttctctgtacaaagttttttttagattggttgtgatgttgtgttgtcttctgtgtgcaggctgagaagatcggtcttgattacatggatgttgaagctcttaaaaagatgaacaagaacaagaagcttgtcaagaagcttgccaagaagtaccatgctttcttagcctccgaggctattatcaagcagattcctcgtctccttggtcctggtctcaacaaggcaggtaagtattctgctctgtcaacatctggctgtcatccttcatagttagaaatgagctttatctgttcttaccgcaatctgtgttgtacattcctactattgtagttatatctaatatgtaatggctctggtactgttctgtggaaaggtatttatcagcctcattttgttactatgttttcagtttcatgtgtggcattcccttagcctatacatatacgaagatataacttatttttgtacagcttagctgtatctgcaagattttgaagcttgttggctttttgcagctccac

SEQ ID NO: 618 - DNA, 152 bp, Setaria italica
  source 1..152: mol_type = genomic DNA
cagaacgtgagtcatgcatgcttttaaccctaccttgttttaccttttctttctgttgcatcttgtgtgtccactgaatacgtgtcagagcaaacaactgatgttaatccgaagctaactcaggcctgtgattttttgttttgcaggtgagg

SEQ ID NO: 619 - DNA, 1068 bp, Setaria italica
  source 1..1068: mol_type = genomic DNA
tggtccaaaccctttgctgaattgtagtacttctcctcccatagatcgcttcaccaggttccgatttgcggtctcttgtgaatttttttgtggtttccgcgtccagcggtgctgttttctcgtggtttatttggtgcgcggtcgatcccttcgcagggcaaagaaattcgctggatgtttagttgatgcgctatcctgctgcgtggtatagcctgtagtagaattgtgctatggcgctgtcactatcgaaatattaggtccacccgtgtgccagtggtgagctcctaacggacgttttagcagaaaaaaacaagaagctgtgaattaacctgaaaatcgtaaaaactgctgctgtgagcctttcggttccacgctgatctgtagttgccaggggccaggggggtggtacttagtgtatcagtgtgcagtaatgactttgakgaatgcatacccattagcarcagwaaaggctaaattatgtagacacaatgtttttcgctwttttttgacaaatatctcccaaatgagttctttgtttattgcgaatccatatgtgatgaataatgatatctgctttattttataaaaccgagatcactggggagcagaattttttctattaagtccacctgtgtgacagtggtgagctagtaataaactttttagcagaaaataaagaacctgggaaattaacctcaaatcatagaaactgctgctgtgatcctttcggtttccagctgtgcagtaatgatttgatgaatacatacatataggaatagtaaggccaaattgtgtagataaatttttgctgttcggacaaatctctccaagagtagttctccgttcctcaagaaaaccttgtgtgatgaatgatgatatctgctttattttagaaaactatcagttgagagcagagtttgtctgatccaatgtacgcgaatatacacatggcacaagcaaaggaaaaataattgttgatttttttaaccatgaaaagaaggggtatttgattcccggtccaggcaacataactagtattgaaaattctgcatttttctctgaatgtgt

SEQ ID NO: 620 - DNA, 1060 bp, Setaria italica
  source 1..1060: mol_type = genomic DNA
tggtccaaaccctttgctgaattgtagtacttctcctcccatagatcgcttcaccaggttccgatttgcggtctcttgtgaatttttttgtggtttccgcgtccagcggtgctgttttctcgtggtttatttggtgcgcggtcgatcccttcgcagggcaaagaaattcgctggatgtttagttgatgcgctatcctgctgcgtggtatagcctgtagtagaattgtgctatggcgctgtcactatcgaaatattaggtccacccgtgtgccagtggtgagctcctaacggacgttttagcagaaaaaacaagaagctgtgaattaacctgaaatcgtagaaactgctgctgtgagcctttcggttccacgctgatctgtagttgccagggcccagggggtggtacttagtgtatcagtgtgcagtaatgacttgatgaatgcatacacatagcagcagtaaaggctaaattatgtagacacaatgttttcgctattttgacaaatatctcccaaatgagttctttgtttattgcgaatccatatgtgatgaataatgatatctgctttattttataaaaccgagatcactggggagcagaattttttctattaagtccacctgtgtgacagtggtgagctagtaataaactttttagcagaaaataaagaacctgggaaattaacctcaaatcatagaaactgctgctgtgatcctttcggtttccagctgtgcagtaatgatttgatgaatacatacatataggaatagtaaggccaaattgtgtagataaatttttgctgttcggacaaatctctccaagagtagttctccgttcctcaagaaaaccttgtgtgatgaatgatgatatctgctttattttagaaaactatcagttgagagcagagtttgtctgatccaatgtacgcgaatatacacatggcacaagcaaaggaaaaataattgttgatttttttaaccatgaaaagaaggggtatttgattcccggtccaggcaacataactagtattgaaaattctgcatttttctctgaatgtgt

SEQ ID NO: 621 - DNA, 1120 bp, Setaria italica
  source 1..1120: mol_type = genomic DNA
gaacaggtgattctcctcccctcatctctctggtccaaaccctttgctgaattgtagtacttctcctcccatagatcgcttcaccaggttccgatttgcggtctcttgtgaatttttttgtggtttccgcgtccagcggtgctgttttctcgtggtttatttggtgcgcggtcgatcccttcgcagggcaaagaaattcgctggatgtttagttgatgcgctatcctgctgcgtggtatagcctgtagtagaattgtgctatggcgctgtcactatcgaaatattaggtccacccgtgtgccagtggtgagctcctaacggacgttttagcagaaaaaacaagaagctgtgaattaacctgaaatcgtagaaactgctgctgtgagcctttcggttccacgctgatctgtagttgccagggcccagggggtggtacttagtgtatcagtgtgcagtaatgacttgatgaatgcatacacatagcagcagtaaaggctaaattatgtagacacaatgttttcgctattttgacaaatatctcccaaatgagttctttgtttattgcgaatccatatgtgatgaataatgatatctgctttattttataaaaccgagatcactggggagcagaattttttctattaagtccacctgtgtgacagtggtgagctagtaataaactttttagcagaaaataaagaacctgggaaattaacctcaaatcatagaaactgctgctgtgatcctttcggtttccagctgtgcagtaatgatttgatgaatacatacatataggaatagtaaggccaaattgtgtagataaatttttgctgttcggacaaatctctccaagagtagttctccgttcctcaagaaaaccttgtgtgatgaatgatgatatctgctttattttagaaaactatcagttgagagcagagtttgtctgatccaatgtacgcgaatatacacatggcacaagcaaaggaaaaataattgttgatttttttaaccatgaaaagaaggggtatttgattcccggtccaggcaacataactagtattgaaaattctgcatttttctctgaatgtgtactgaacattgatctctgttacagaaaact

SEQ ID NO: 622 - DNA, 1120 bp, Setaria italica
  source 1..1120: mol_type = genomic DNA
caacaggtgattctcctcccctcatctctctggtccaaaccctttgctgaattgtagtacttctcctcccatagatcgcttcaccaggttccgatttgcggtctcttgtgaatttttttgtggtttccgcgtccagcggtgctgttttctcgtggtttatttggtgcgcggtcgatcccttcgcagggcaaagaaattcgctggatgtttagttgatgcgctatcctgctgcgtggtatagcctgtagtagaattgtgctatggcgctgtcactatcgaaatattaggtccacccgtgtgccagtggtgagctcctaacggacgttttagcagaaaaaacaagaagctgtgaattaacctgaaatcgtagaaactgctgctgtgagcctttcggttccacgctgatctgtagttgccagggcccagggggtggtacttagtgtatcagtgtgcagtaatgacttgatgaatgcatacacatagcagcagtaaaggctaaattatgtagacacaatgttttcgctattttgacaaatatctcccaaatgagttctttgtttattgcgaatccatatgtgatgaataatgatatctgctttattttataaaaccgagatcactggggagcagaattttttctattaagtccacctgtgtgacagtggtgagctagtaataaactttttagcagaaaataaagaacctgggaaattaacctcaaatcatagaaactgctgctgtgatcctttcggtttccagctgtgcagtaatgatttgatgaatacatacatataggaatagtaaggccaaattgtgtagataaatttttgctgttcggacaaatctctccaagagtagttctccgttcctcaagaaaaccttgtgtgatgaatgatgatatctgctttattttagaaaactatcagttgagagcagagtttgtctgatccaatgtacgcgaatatacacatggcacaagcaaaggaaaaataattgttgatttttttaaccatgaaaagaaggggtatttgattcccggtccaggcaacataactagtattgaaaattctgcatttttctctgaatgtgtactgaacattgatctctgttacaggaaact

SEQ ID NO: 623 - DNA, 499 bp, Setaria italica
  source 1..499: mol_type = genomic DNA
actccggtaacgatcttcgccactcattcaccctgtgtccctcgctagagtctccccttcctccataccgccgccccgcgcgggcgcggtacggtgctctcagatccgcccggcattgctcgctcgggccgatccgatctcgcatttgcgcgctcccgccgcggatccggccggatctcgcggaaatggggcgcgggtttctttggcatgctgtagatctgcttgtttcggctcgtgatctggaggcgccgcgggcgtttcggtaacgaaatgacctgatctgtggtggggttggggaatgccatttattagttcgttaattgctggttttctggtatcttattgggagggttcaattgatgcctttagagtagattttgtatgtagagcaaacaatggaaacaaatcatcgatagctttgcaatttgcctgctttgcttatttaattcctgcttgatttgacaaatgtggcatcgtgcgagctttcctgtaggtagaa

SEQ ID NO: 624 - DNA, 622 bp, Setaria italica
  source 1..622: mol_type = genomic DNA
ttcaccgtaagcgagcgctctctccctcgctctcttctggtcctctacgacgctgctctctgttcttgttagcttctagatcttgctctccgttcactccaaggcttggtcttgcgaccttgcgggcccggatctgagtagcctgggcgaagatcgggccaaaaatcgtatctttcatcggttcatttcctccttaggatcaaggaatccatgctctaggatgctcctagattgttccacaaattgacacagtggaaacatgctgctgtgaaattcattcagactttatgggtcagaaattgttctctgggaactatataacttagtcagtgccaggggtattacataaattgcttttgttttctgacattttttcttgtaggctgctgtgaaattcagacattatgggttagaagttgttgtttaggaactatataacttaaccagtgccaggggtattgcataaattgctttgttttctgacattttttcttgtacgcatcaagttaatgctttcaattaaaatgcatttgcatgttcaatgttcctttataccatgtattgagctaaggaaacctttcatcacaaactgattctcttcatatgccacttgcagttattc

SEQ ID NO: 625 - DNA, 622 bp, Setaria italica
  source 1..622: mol_type = genomic DNA
ttcaccgtaagcgagcgctctctccctcgctctcttctggtcctctacgacgctgctctctgttcttgttagcttctagatcttgctctccgttcactccaaggcttggtcttgcgaccttgcgggcccggatctgagtagcctgggcgaagatcgggccaaaaatcgtatctttcatcggttcatttcctccttaggatcaaggaatccatgctctaggatgctcctagattgttccacaaattgacacagtggaaacatgctgctgtgaaattcattcagactttatgggtcagaaattgttctctgggaactatataacttagtcagtgccaggggtattacataaattgcttttgttttctgacattttttcttgtaggctgctgtgaaattcagacattatgggttagaagttgttgtttaggaactatataacttaaccagtgccaggggtattgcataaattgctttgttttctgacattttttcttgtacgcatcaagttaatgctttcaattaaaatgcatttgcatgttcaatgttcctttataccatgtattgagctaaggaaacctttcatcacaaactgattctcttcatatgccacttgcaggtactc

SEQ ID NO: 626 - DNA, 1365 bp, Setaria italica
  source 1..1365: mol_type = genomic DNA
tccccggtaatctcctcctccccctcccctccgctccctggagcccctctactcgcgatctccccacgcactagctcctgctccagcatttttcgagtgtttggcgctcagatctgagcggcctggctcgagatctgcggtttgctcatgcgttctggtcacttgcctccggtgctcccgccagatccggggcgggtaccgcgcgatccgccagcggatcgtgcttcgtggttggtgctagggtgttcgtctgacgtctgtgcttgatgaactccgtcctgttcctgatctgtagcgtttctgcgtgccgatgcgtctgattttgtgcgcacgcctgatgtgtgtttgcgggactgccgtgcgaggaggctctctgagctacgtacctaggaatggtgactgtgatgtgcctgaatgcgcttacgtgttgctggcgatgcacgagcccttggggtgtgactgcttgactacttcccagctccgacgttctagtttcctgcttgactgggagtctgggagagcttcgtgatgctctgtctagcaagtccagatagttgcggtaactggtaacatggttggatgaaagtcgcggatagttaatttggtgtgattgaactaccagagtgtaaaaatccgtgtgtggttcattcggagagagctatttggaaagcatatctgcatgttaggatgtttccttgtcatgaatagctattgagcacataccacccaaaattagtgacaacttagtgatgtttcatggcaccaaatgttaggctgaaaagttcagcatgtgatttttgttgctctgcaggtcacattttagacaacaaaaaagcttgttagattggccagtacatgtacactactttttcaaagcaatgctagtcttttcctatcatgtttagttatacgaatgtttggttatggtactttacacatttttataaatgttggaaacaacagtccgcaagttatcagattatttcttactctctccgttccaaattgtaggtcgttttgacttttgtaggttcatagatattattatgcatctagatatagtgtatgtctaggtgcataataatatctatgaatctagaaaagtcaaaacgacctacaatttggaacggagggagtacaacattagcctagtcggtgaaatgaatcccacttttgcctggcagtaagctctgtacatatgttgtttttattgacttatagatgcacaaatataaaggttcagttgatatgccttcaaaacttttatgtttacgatgcttactggttcccttgtacagctactatctagcaggatacacttgctgttaactgataccccttttttgctacctcttgcagagtacc

SEQ ID NO: 627 - DNA, 1365 bp, Setaria italica
  source 1..1365: mol_type = genomic DNA
tccccggtaatctcctcctccccctcccctccgctccctggagcccctctactcgcgatctccccacgcactagctcctgctccagcatttttcgagtgtttggcgctcagatctgagcggcctggctcgagatctgcggtttgctcatgcgttctggtcacttgcctccggtgctcccgccagatccggggcgggtaccgcgcgatccgccagcggatcgtgcttcgtggttggtgctagggtgttcgtctgacgtctgtgcttgatgaactccgtcctgttcctgatctgtagcgtttctgcgtgccgatgcgtctgattttgtgcgcacgcctgatgtgtgtttgcgggactgccgtgcgaggaggctctctgagctacgtacctaggaatggtgactgtgatgtgcctgaatgcgcttacgtgttgctggcgatgcacgagcccttggggtgtgactgcttgactacttcccagctccgacgttctagtttcctgcttgactgggagtctgggagagcttcgtgatgctctgtctagcaagtccagatagttgcggtaactggtaacatggttggatgaaagtcgcggatagttaatttggtgtgattgaactaccagagtgtaaaaatccgtgtgtggttcattcggagagagctatttggaaagcatatctgcatgttaggatgtttccttgtcatgaatagctattgagcacataccacccaaaattagtgacaacttagtgatgtttcatggcaccaaatgttaggctgaaaagttcagcatgtgatttttgttgctctgcaggtcacattttagacaacaaaaaagcttgttagattggccagtacatgtacactactttttcaaagcaatgctagtcttttcctatcatgtttagttatacgaatgtttggttatggtactttacacatttttataaatgttggaaacaacagtccgcaagttatcagattatttcttactctctccgttccaaattgtaggtcgttttgacttttgtaggttcatagatattattatgcatctagatatagtgtatgtctaggtgcataataatatctatgaatctagaaaagtcaaaacgacctacaatttggaacggagggagtacaacattagcctagtcggtgaaatgaatcccacttttgcctggcagtaagctctgtacatatgttgtttttattgacttatagatgcacaaatataaaggttcagttgatatgccttcaaaacttttatgtttacgatgcttactggttcccttgtacagctactatctagcaggatacacttgctgttaactgataccccttttttgctacctcttgcagggtagc

SEQ ID NO: 628 - DNA, 1205 bp, Setaria italica
  unsure 592: note = unsure at all n locations
  source 1..1205: mol_type = genomic DNA
tttcaggtgagcgcatcgaggtccccttctgtttatactcctttaatgctgctgtttcttgttgctgccgaggatgtttagatgtctaggggctgggttgggtggtagggtgcagtggggttcgccgatcgtcttgggttctggttggctatcaggggctggatccgtagtaggagtaagggccgcaatgttgctgagactttcttggtgacttgtgtggatgcttcgatcttgtgtgttgaggtggactagtagtattgacagtatatcccttggtaattttgtgatatggtattagtttgtgctaatggatgcctggttcttctgaattgcaagtgaattccgcagggttccttgtgcttagaaatggaatttgtgatcttagtgttcagacagagtcactttgcttcaagtcaccaccgacgtattagttttcaatttttgagcaaattttgtgcttctatagaatacggttacaaacaattatagccagatattacttctttgacttcttaaattgttaagaaaattgttccaagatcgaaaatctccctttccacgaatcatgtagatggrtactctttyccccccnaaagagaaacaggtcatgatttttaatatattggaaattgatgcgcatggtctggatagcttcagctgctgatgcctagcggtccttctgatccgaaaatgctaaattcttcagatcgtcagctgtgaggaatcatgaatttggttcctgcaattgaccatgtgtttgactaaatccttcatggattggcgaatgccttgcactattacaccaagagtttgcatgcactggacagcctgatttgtttgtatacatgcaactgaaacctaactacttattaataccagctggaaagcgaacggttttggtgttgtaagactagctgttgctgtttacaactatttttttcttttgtttgaatatagtccctgttacagttagaattgcttgtatagttgtatttggcttcctgtttgataagtactctaaaggaatgtttagaggtattaggatctttttctcagttaatagatttagyctgtcaagatgtaactctagtcttctgttgatagtaggaagaccaactttttctcttcttgctgaagtaactttagcgcatattggtctaagtcttggtaaatgctgttttcattcttgaacattgcagatcatt

SEQ ID NO: 629 - DNA, 1202 bp, Setaria italica
  source 1..1202: mol_type = genomic DNA
tttcaggtgagcgcatcgaggtccccttctgtttatactcctttaatgctgctgtttcttgttgctgccgaggatgtttagatgtctaggggctgggttgggtggtagggtgcagtggggttcgccgatcgtcttgggttctggttggctatcaggggctggatccgtagtaggagtaagggccgcaatgttgctgagactttcttggtgacttgtgtggatgcttcgatcttgtgtgttgaggtggactagtagtattgacagtatatcccttggtaattttgtgatatggtattagtttgtgctaatggatgcctggttcttctgaattgcaagtgaattccgcagggttccttgtgcttagaaatggaatttgtgatcttagtgttcagacagagtcactttgcttcaagtcaccaccgacgtattagttttcaatttttgagcaaattttgtgcttctatagaatacggttacaaacaattatagccagatattacttctttgacttcttaaattgttaagaaaattgttccaagatcgaaaatctcctttccacgaatcatgtagatgggactcttttccccccaaaagagaacaggtcatgatttttaatatattggaaattgatgcgcatggtctggatagcttcagctgctgatgcctagcggtccttctgatccgaaaatgctaaattcttcagatcgtcagctgtgaggaatcatgaatttggttcctgcaattgaccatgtgtttgactaaatccttcatggattggcgaatgccttgcactattacaccaagagtttgcatgcactggacagcctgatttgtttgtatacatgcaactgaaacctaactacttattaataccagctggaaagcgaacggttttggtgttgtaagactagctgttgctgtttacaactatttttttcttttgtttgaatatagtccctgttacagttagaattgcttgtatagttgtatttggcttcctgtttgataagtactctaaaggaatgtttagaggtattaggatctttttctcagttaatagatttagyctgtcaagatgtaactctagtcttctgttgatagtaggaagaccaactttttctcttcttgctgaagtaactttagcgcatattggtctaagtcttggtaaatgctgttttcattcttgaacattgcagatcatt

SEQ ID NO: 630 - DNA, 1202 bp, Setaria italica
  source 1..1202: mol_type = genomic DNA
tttcaggtgagcgcatcgaggtccccttctgtttatactcctttaatgctgctgtttcttgttgctgccgaggatgtttagatgtctaggggctgggttgggtggtagggtgcagtggggttcgccgatcgtcttgggttctggttggctatcaggggctggatccgtagtaggagtaagggccgcaatgttgctgagactttcttggtgacttgtgtggatgcttcgatcttgtgtgttgaggtggactagtagtattgacagtatatcccttggtaattttgtgatatggtattagtttgtgctaatggatgcctggttcttctgaattgcaagtgaattccgcagggttccttgtgcttagaaatggaatttgtgatcttagtgttcagacagagtcactttgcttcaagtcaccaccgacgtattagttttcaatttttgagcaaattttgtgcttctatagaatacggttacaaacaattatagccagatattacttctttgacttcttaaattgttaagaaaattgttccaagatcgaaaatctcctttccacgaatcatgtagatgggactcttttccccccaaaagagaacaggtcatgatttttaatatattggaaattgatgcgcattgtctggatagcttcagctgctgatgcctagcggtccttctgatccgaaaatgctaaattcttcagatcgtcagctgtgaggaatcatgaatttggttcctgcaattgaccatgtgtttgactaaatccttcatggattggcgaatgccttgcactattacaccaagagtttgcatgcactggacagcctgatttgtttgtatacatgcaactgaaacctaactacttattaataccagctggaaagcgaacggttttggtgttgtaagactagctgttgctgtttacaactatttttttcttttgtttgaatatagtccctgttacagttagaattgcttgtatagttgtatttggcttcctgtttgataagtactctaaaggaatgtttagaggtattaggatctttttctcagttaatagatttagtctgtcaagatgtaactctagtcttctgttgatagtaggaagaccaactttttctcttcttgctgaagtaactttagcgcatattggtctaagtcttggtaaatgctgttttcattcttgaacattgcagatcatt

SEQ ID NO: 631 - DNA, 1202 bp, Setaria italica
  source 1..1202: mol_type = genomic DNA
cttcaggtgagcgcatcgaggtccccttctgtttatactcctttaatgctgctgtttcttgttgctgccgaggatgtttagatgtctaggggctgggttgggtggtagggtgcagtggggttcgccgatcgtcttgggttctggttggctatcaggggctggatccgtagtaggagtaagggccgcaatgttgctgagactttcttggtgacttgtgtggatgcttcgatcttgtgtgttgaggtggactagtagtattgacagtatatcccttggtaattttgtgatatggtattagtttgtgctaatggatgcctggttcttctgaattgcaagtgaattccgcagggttccttgtgcttagaaatggaatttgtgatcttagtgttcagacagagtcactttgcttcaagtcaccaccgacgtattagttttcaatttttgagcaaattttgtgcttctatagaatacggttacaaacaattatagccagatattacttctttgacttcttaaattgttaagaaaattgttccaagatcgaaaatctcctttccacgaatcatgtagatgggactcttttccccccaaaagagaacaggtcatgatttttaatatattggaaattgatgcgcattgtctggatagcttcagctgctgatgcctagcggtccttctgatccgaaaatgctaaattcttcagatcgtcagctgtgaggaatcatgaatttggttcctgcaattgaccatgtgtttgactaaatccttcatggattggcgaatgccttgcactattacaccaagagtttgcatgcactggacagcctgatttgtttgtatacatgcaactgaaacctaactacttattaataccagctggaaagcgaacggttttggtgttgtaagactagctgttgctgtttacaactatttttttcttttgtttgaatatagtccctgttacagttagaattgcttgtatagttgtatttggcttcctgtttgataagtactctaaaggaatgtttagaggtattaggatctttttctcagttaatagatttagtctgtcaagatgtaactctagtcttctgttgatagtaggaagaccaactttttctcttcttgctgaagtaactttagcgcatattggtctaagtcttggtaaatgctgttttcattcttgaacattgcaggtcatc

SEQ ID NO: 632 - DNA, 1017 bp, Setaria italica
  source 1..1017: mol_type = genomic DNA
gccaaggtatagccgggtttccccttgctctcgcaccgatttgatcggaggaaacgatcggtcgtaggcaagattcggttcgattgatcgccgcgcgacgttcctgtccgagttgacttcgatttccatgtgaattttgctgtatttggctgttctttttttgtctgaccccagcataacgagcaagaatcgccggcatatgtgtactatgtgtgctaatttctgcctctgcggtgttcgatcggattctctttttgtgtgatgtaccttacggcccagtcaattttgcacgagattatactatataacttagcaagtgctgataccatggtaggatgtgctaagataggatgtggcctagcgatccctgatgggtgctatgctaattcgttgcaattgccaaatagcggaaattatatccaggatactctgtgaagaactggagatgatctaaagctgcgaaatcacagtgcttgtgtccaaattcgattaaccattttcagccaaaatagaagcagtgaggtttcagccgatacatcaatcaacgtagataggtggtatttgttggcagtaattttctctgctaccgtgcatgtgtgtgttttatcattgcgaataaaaaacagagctccgatgtgtcgtgtatattatgtcaccgaacttgatgccaatcaagataggaataatttgtattatcagccaccactaaggtccagtcaatcactgcaaattgctcgaaagcttatacttgcataagtcaagtagcagtttcttaatcatgaatatgttcctcaaaaaaatagtatctgaatatttgtttttgactgatgagtggtataccgcactttgatgtcatcataccattttatggcttttacttgggtccgtggaccactcaagctgtgtgacgcttttaacaccactgcagaatgcactgaatttgaatacattctgaatattattattatcgaaacatacattctgatttctgcatacaactttctgctgcagaaaact

SEQ ID NO: 633 - DNA, 1018 bp, Setaria italica
  source 1..1018: mol_type = genomic DNA
gccaaggtatagccgggtttccccttgctctcgcaccgatttgatcggaggaaacgatcggtcgtaggcaagattcggttcgattgatcgccgcgcgacgttcctgtccgagttgacttcgatttccatgtgaattttgctgtatttggctgttctttttttgtctgaccccagcataacgagcaagaatcgccggcatatgtgtactatgtgtgctaatttctgcctctgcggtgttcgatcggattctctttttgtgtgatgtaccttacggcccagtcaattttgcacgagattatactatataacttagcaagtgctgataccatggtaggatgtgctaagataggatgtggcctagcgatccctgatgggtgctatgctaattcgttgcaattgccaaatagcggaaattatatccaggatactctgtgaagaactggagatgatctaaagctgcgaaatcacagtgcttgtgtccaaattcgattaaccattttcagccaaaatagaagcagtgaggtttcagccgatacatcaatcaacgtagataggtggtatttgttggcagtaattttctctgctaccgtgcatgtgtgtgttttatcattgcgaataaaaaaacagagctccgatgtgtcgtgtatattatgtcaccgaacttgatgccaatcaagataggaataatttgtattatcagccaccactaaggtccagtcaatcactgcaaattgctcgaaagcttatacttgcataagtcaagtagcagtttcttaatcatgaatatgttcctcaaaaaaatagtatctgaatatttgtttttgactgatgagtggtataccgcactttgatgtcatcataccattttatggcttttacttgggtccgtggaccactcaagctgtgtgacgcttttaacaccactgcagaatgcactgaatttgaatacattctgaatattattattatcgaaacatacattctgatttctgcatacaactttctgctgcagaaaact

SEQ ID NO: 634 - DNA, 1018 bp, Setaria italica
  source 1..1018: mol_type = genomic DNA
accaaggtatagccgggtttccccttgctctcgcaccgatttgatcggaggaaacgatcggtcgtaggcaagattcggttcgattgatcgccgcgcgacgttcctgtccgagttgacttcgatttccatgtgaattttgctgtatttggctgttctttttttgtctgaccccagcataacgagcaagaatcgccggcatatgtgtactatgtgtgctaatttctgcctctgcggtgttcgatcggattctctttttgtgtgatgtaccttacggcccagtcaattttgcacgagattatactatataacttagcaagtgctgataccatggtaggatgtgctaagataggatgtggcctagcgatccctgatgggtgctatgctaattcgttgcaattgccaaatagcggaaattatatccaggatactctgtgaagaactggagatgatctaaagctgcgaaatcacagtgcttgtgtccaaattcgattaaccattttcagccaaaatagaagcagtgaggtttcagccgatacatcaatcaacgtagataggtggtatttgttggcagtaattttctctgctaccgtgcatgtgtgtgttttatcattgcgaataaaaaaacagagctccgatgtgtcgtgtatattatgtcaccgaacttgatgccaatcaagataggaataatttgtattatcagccaccactaaggtccagtcaatcactgcaaattgctcgaaagcttatacttgcataagtcaagtagcagtttcttaatcatgaatatgttcctcaaaaaaatagtatctgaatatttgtttttgactgatgagtggtataccgcactttgatgtcatcataccattttatggcttttacttgggtccgtggaccactcaagctgtgtgacgcttttaacaccactgcagaatgcactgaatttgaatacattctgaatattattattatcgaaacatacattctgatttctgcatacaactttctgctgcaggaaact

SEQ ID NO: 635 - DNA, 408 bp, Setaria italica
  source 1..408: mol_type = genomic DNA
ttgctggtaaggaagccctacctttctatggttgttttttttatttcattctgttctgcggtggatggatctcctgttcgctgcgaatgagcgctccaatccgaatccttgttgttgctggtatgggtgctccgattcgtctatctcgtggcggatttattcgctgcgcggcggagtagtagttggatcagtttgtttcccagtttttttgttaggattatgaagaaaggtttatggggaacggaaggtttacgtgccacaataaactgcagcaagcagcctcactggaagtggtagcttgcctgcagaatttatttgataggattacctttcacgggctaaataagcagattctgattagtaggagtacccttcttatgcttgaatctgttgatgcaacagaacaac

SEQ ID NO: 636 - DNA, 1418 bp, Setaria italica
  unsure 1004..1160: note = unsure at all n locations
  source 1..1418: mol_type = genomic DNA
tccccggtaatctcctcctccccctcccctccgctccctggagcccctctactcgcgatctccccacgcactagctcctgctccagcatttttcgagtgtttggcgctcagatctgagcggcctggctcgagatctgcggtttgctcatgcgttctggtcacttgcctccggtgctcccgccagatccggggcgggtaccgcgcgatccgccagcggatcgtgcttcgtggttggtgctagggtgttcgtctgacgtctgtgcttgatgaactccgtcctgttcctgatctgtagcgtttctgcgtgccgatgcgtctgattttgtgcgcacgcctgatgtgtgtttgcgggactgccgtgcgaggaggctctctgagctacgtacctaggaatggtgactgtgatgtgcctgaatgcgcttacgtgttgctggcgatgcacgagcccttggggtgtgactgcttgactacttcccagctccgacgttctagtttcctgcttgactgggagtctgggagagcttcgtgatgctctgtctagcaagtccagatagttgcggtaactggtaacatggttggatgaaagtcgcggatagttaatttggtgtgattgaactaccagagtgtaaaaatccgtgtgtggttcattcggagagagctatttggaaagcatatctgcatgttaggatgtttccttgtcatgaatagctattgagcacataccacccaaaattagtgacaacttagtgatgtttcatggcaccaaatgttaggctgaaaagttcagcatgtgatttttgttgctctgcaggtcacattttagacaacaaaaaagcttgttagattggccagtacatgtacactactttttcaaagcaatgctagtcttttcctatcatgtttagttatacgaatgtttggttatggtactttacacatttttataaatgttggaaacaacagtccgcaagttatcagattatttcttactctctccgttccannnnnnnnnnnnnnnnnnnnnnnnnnnnnnnnnnnnnnnnnnnnnnnnnnnnnnnnnnnnnnnnnnnnnnnnnnnnnnnnnnnnnnnnnnnnnnnnnnnnnnnnnnnnnnnnnnnnnnnnnnnnnnnnnnnnnnnnnnnnnnnnnnnnnnnnnnnnnaaacgacctacaatttggaacggagggagtacaacattagcctagtcggtgaaatgaatcccacttttgcctggcagtaagctctgtacatatgttgtttttattgacttatagatgcacaaatataaaggttcagttgatatgccttcaaaacttttatgtttacgatgcttactggttcccttgtacagctactatctagcaggatacacttgctgttaactgataccccttttttgctacctcttgcagagtacc

SEQ ID NO: 637 - DNA, 614 bp, Setaria italica
  source 1..614: mol_type = genomic DNA
atccaggtatgccccgccgattctctaacgttagatccctttgcgcatcctgtcttctggtcgttacagcgatctggctgttcgttctagggttgtatttgctccaaaatgcgtgttttgctagtcttgtgacgccatattagtcggtagatttggtctcgtagaaatgggatgatggtttgcaaatgtttgtttggtggtagtttttcaggtccaaccgtcccgagtgagatggtaaatcaggcgcttagccgtcagattgtatgctgaccattaggatttacttgaatcgtttagagcatatttaatggaattattagcgtggcttacaagctgcgaagacgtggttaagatttgatgagtgctgttctagactgtacgtgtcttagattatttcaattcatgtatccaaaattttgaaattttcagcttcattattgtatgatgatggattcgtgtgttgtcaactagattgtaagctaatttgtataatcttttggttgggttttgctgatggtactctattgttacgctatcacttaatctagctccttttatgcctgaaaaaaatggactctagtgacactgtttctttgtggattgaacaggatgaa

SEQ ID NO: 638 - DNA, 614 bp, Setaria italica
  source 1..614: mol_type = genomic DNA
atccaggtatgccccgccgattctctaacgttagatccctttgcgcatcctgtcttctggtcgttacagcgatctggctgttcgttctagggttgtatttgctccaaaatgcgtgttttgctagtcttgtgacgccatattagtcggtagatttggtctcgtagaaatgggatgatggtttgcaaatgtttgtttggtggtagtttttcaggtccaaccgtcccgagtgagatggtaaatcaggcgcttagccgtcagattgtatgctgaccattaggatttacttgaatcgtttagagcatatttaatggaattattagcgtggcttacaagctgcgaagacgtggttaagatttgatgagtgctgttctagactgtacgtgtcttagattatttcaattcatgtatccaaaattttgaaattttcagcttcattattgtatgatgatggattcgtgtgttgtcaactagattgtaagctaatttgtataatcttttggttgggttttgctgatggtactctattgttacgctatcacttaatctagctccttttatgcctgaaaaaaatggactctagtgacactgtttctttgtggattgaacaggatcag

SEQ ID NO: 639 - DNA, 616 bp, Setaria italica
  source 1..616: mol_type = genomic DNA
atccaggtatgccccgccgattctctaacgttagatccctttgcgcatcctgtcttctggtcgttacagcgatctggctgttcgttctagggttgtatttgctccaaaatgcgtgttttgctagtcttgtgacgccatattagtcggtagatttggtctcgtagaaatgggatgatggtttgcaaatgtttgtttggtggtagtttttcaggtccaaccgtcccgagtgagatggtaaatcaggcgcttagccgtcagattgtatgctgaccattaggatttacttgaatcgtttagagcatatttaatggaattattagcgtggcttacaagctgcgaagacgtggttaagatttgatgagtgctgttctagactgtacgtgtcttagattatttcaattcatgtatccaaaattttgaaattttcagcttcattattgtatgatgatggattcgtgtgttgtcaactagattgtaagctaatttgtataatcttttggttgggttttgctgatggtactctattgttacgctatcacttaatctagctccttttatgcctgaaaaaaatggactctagtgacactgtttctttgtggattgaacaggatcaggg

SEQ ID NO: 640 - DNA, 655 bp, Setaria italica
  source 1..655: mol_type = genomic DNA
atccaggtatgccctggccgatcttctcacgttagatcccttctgtgtatggtgtcttctgatcttctgttcgttacagcgatctggctgttcgttctagggctgttattgttgctgggttggctccaaaatgcgcgttttgctagtcttgtggcgccatagtagtcagtagatttgcttctgttgaaatgggatgatggtttgcacatgtttgtttggtggtggttgttcaggtctggatgagatattaaatctttcgcttagccctcagattgtatgttaggatttgcttgaatcattttgagtatacttaatggaattattagcttagcttaatggtcgagaagacgtggttaagatttgctttgctgactacctagtgctgttgtagactgtacgtatttggggttatttcaattcatgtatccagaagtttaaaactttcagcttcattggtggcacacaaaatgttaagtgtttgtattatgatagattcatgtgttgtcaactagattgaaggctattcgtataatcttttggttgggtttttgctgaagggtgctctattgctatgcaatcacttaatctagctccttttatgcctgaaaaatggacttttagtgacactgtttctttgtggattgaacaggatgaa

SEQ ID NO: 641 - DNA, 655 bp, Setaria italica
  source 1..655: mol_type = genomic DNA
atccaggtatgccctggccgatcctctcacgttagatcccttctgtgtatggtgtcttctgatcttctgttcgttacagcgatctggctgttcgttctagggctgttattgttgctgggttggctccaaaatgcgcgttttgctagtcttgtggcgccatagtagtcagtagatttgcttctgttgaaatgggatgatggtttgcacatgtttgtttggtggtggttgttcaggtctggatgagatattaaatctttcgcttagccctcagattgtatgttaggatttgcttgaatcattttgagtatacttaatggaattattagcttagcttaatggtcgagaagacgtggttaagatttgctttgctgactacctagtgctgttgtagactgtacgtatttggggttatttcaattcatgtatccagaagtttaaaactttcagcttcattggtggcacacaaaatgttaagtgtttgtattatgatagattcatgtgttgtcaactagattgaaggctattcgtataatcttttggttgggtttttgctgaagggtgctctattgctatgcaatcacttaatctagctccttttatgcctgaaaaatggacttttagtgacactgtttctttgtggattgaacaggatcag

SEQ ID NO: 642 - DNA, 593 bp, Setaria italica
  source 1..593: mol_type = genomic DNA
atccaggtaatgcaccacgagcccgagccgatccaccctctcttgttaggcagttcttctagggctgctgttgttgctaggccaggctcaagatgcgtgcttgctgatgctgttgcgtcgtagtagatgttactgtggtgaaatggaaaactctagtcatcggtgtttgtgctatggttgcggttcgggtgagatgttgtttctttgcgctggattctgatactgtgaattgagcattatggtttgctagaaacgttttgaaatgtctctgaatcttcagttcctccggttcttcaatcttcggcacaaatgtatagtggcgttctgtggtaggcatttacaatgtttcactagaggtatccagggctggcctacatactcttcttttctgattatcgcaatattgttctgtggtggcactgtgccttgtagtttgaaaacgttattgttagcatatacatgcctgacttttccattcgggtagaatcatggtgctctcttaatttgattgtagcttgatttgtcgctttgtcatgtatctgaaattcctgaactaactgtgacatcgatttttcatggttgagcaggatgaa

SEQ ID NO: 643 - DNA, 593 bp, Setaria italica
  source 1..593: mol_type = genomic DNA
atccaggtaatgcaccacgagcccgagccgatccaccctctcttgttaggcagttcttctagggctgctgttgttgctaggccaggctcaagatgcgtgcttgctgatgctgttgcgtcgtagtagatgttactgtggtgaaatggaaaactctagtcatcggtgtttgtgctatggttgcggttcgggtgagatgttgtttctttgcgctggattctgatactgtgaattgagcattatggtttgctagaaacgttttgaaatgtctctgaatcttcagttcctccggttcttcaatcttcggcacaaatgtatagtggcgttctgtggtaggcatttacaatgtttcactagaggtatccagggctggcctacatactcttcttttctgattatcgcaatattgttctgtggtggcactgtgccttgtagtttgaaaacgttattgttagcatatacatgcctgacttttccattcgggtagaatcatggtgctctcttaatttgattgtagcttgatttgtcgctttgtcatgtatctgaaattcctgaactaactgtgacatcgatttttcatggttgagcaggatcag

SEQ ID NO: 644 - DNA, 440 bp, Setaria italica
  source 1..440: mol_type = genomic DNA
gagaaggtgtttattcctgaaatcccattttcgcatctcattcttagctaaattctgattttctgagtcatttagggaggggtattttcctgcaatcgcagttatgatttggtattagcttccatttagttaattacctcctggcgaaacacatgtttctaaaggcagaataagatagctagtggtttaacttttaagttaactatactgatatacatgcaatttgtcattgctgcatcttatatttagttcacattgacaacagactgaaactacaccactcatctgtcttgcattttagcaatctgcacctcatgacgcaaaataattttacttgctatagctgtgcttcactcatggtattcatcccttcaagacaattttttttgggaattgtgctcatttcgaattatatggttcttttcttgttccaggaagtg

SEQ ID NO: 645 - DNA, 196 bp, Setaria italica
  source 1..196: mol_type = genomic DNA
ggactggtaaggattgcttcagcgcaatcagtcaccgcttctccgtttgtttgggcgcttcgctccgtcaaaatgccgggccgcgcgcaaccatcgttgagcaaatttcgggagttccgatttgattgttcatagatgcttgctacctacgctgagagaggcccttcgttttgttgctgcttgtggtcaggtggga

SEQ ID NO: 646 - DNA, 95 bp, Setaria italica
  source 1..95: mol_type = genomic DNA
gcgccggtaaggtggctatcagaggccgcggggatgcgagcgctgttgactgagaggggaagcactgacaggagcttttgtttcgccagggtgtg

SEQ ID NO: 647 - DNA, 420 bp, Setaria italica
  source 1..420: mol_type = genomic DNA
atgggggtattatatctcttctgcttcaaacttgtctttcagttcctttggttgcacccatgtgagggcgcttgctttttagttctcgtacattggttcaggttatgttcatcagtttggtgattctattctgggacaatacggccactttagctgttcttcagctgctaatattggggcctttgggcaacaattcatttactagtgtacaagaaacataatgcatcaaggctctgcgccctattgaacaattgcagtgaaatgaacagattaagcaaaaatgaacagtgaaatgttgttgtcagtgatgatgaattgcagtgaaatgttctatttatgctgtgagcctgtgaaattagcgtgtccttccaatgcttgatcgttttgtctaaattccacccatctttttaacaggcaagt

SEQ ID NO: 648 - DNA, 130 bp, Setaria italica
  source 1..130: mol_type = genomic DNA
acgcaggtgagatctcctatctattcgattttatcctctttcggttcctgtttgtttgttgctgctaccggctttctacgtggcatgagcgactgagattgttcgtgcgcaacaatttcctcaggtcatc

SEQ ID NO: 649 - DNA, 648 bp, Setaria italica
  source 1..648: mol_type = genomic DNA
tctgaggtgttctgatgtttcccttgctcctacccaattttttcactgaattggtcagagagttatctctgtttatgctaatccagatagggaggttgtattaagctagttcagcttacatactactctgacaagattaagttaaaagggtgcttattgatcatcacctgctttgaacttgtttttattgaataatggtagattgagagaatacaaagtcaaccaattgtcctgtccgcctgtgaacaagtgtgccaagttcagacaagtgtagcctgcattgctgttgctgccctgcaattccaagtcgtttgattgcccatagtgttactagcacctggatttgtggtgtacctgtcatttggtcctacaatgtacccaatttgtaacactgtgctaccacttctgttttcttctgaagaatgatagaagatgcacatctgtgctgacacttccttctgttttcttctgaacaatgacagaagatgcacatctgtgctgacacttccttctgttttcttctgaacaatcacacaagatgcacatctgttctgtgctgacacttccttctgttgtcttctaaagaatgacagaaaatgcacatctgtgctgactgctgacacctcctgttttcttctgaaggaagac

SEQ ID NO: 650 - DNA, 135 bp, Setaria italica
  source 1..135: mol_type = genomic DNA
taactggtatgataagttgtaccaagttatggcatcaccttgcatgcttttttcacttttagatttgataatctttaatcagtagaaacttcatgggtgaccttctcccttgcggttgaccgtatgcaggtcccg

SEQ ID NO: 651 - DNA, 543 bp, Setaria italica
  source 1..543: mol_type = genomic DNA
atctgtgtacgtttcacgggtctcattcccacctaatatgttttttttaacacgacttgaggggatatcgactggatttcatgtcgctgtggatgatattttggtcatatcaaatttctcgtctttgttcagtcaaatatggtcaaactggtggcgaaagcacatttcccttcttttaaaagaatacgtttcaaggaagatttgataaacagaatgaccaaattttcggtggcatactgaagaagagagagtccatcttagcacaaacaaaaaacattaataaaaaattggcactggtagtgaaatttctcaagcttgaattcatgtccggagataagttaatttatgacaggagggagtatacaggcacccagcttgtccatctgttctgctgtatctctgtacttatgaagatttttacaacttcccttacgaatttcctgaggagttgcctttggatctttatttcactaattattctgcctttatttattctccttgcttctaaacaaaacactaacacaagtaatcctgcaggactgg

SEQ ID NO: 652 - DNA, 1017 bp, Setaria italica
  source 1..1017: mol_type = genomic DNA
gaaccggtaacttgtttagttctaaaagaatgctgatgaagtgatgatgattcgtccgtattttttctagcacttttatttagcttatatgacactgaacaacctgttagttttggtggaatttaccatatgcattaatctgacgagaataaatctcttgtgtacctgagatttcttcttttttttcctttagctatattttgccccttctactctggcctcttattgaaaaaattaagacttgttgggaaaaaggaatcattttcgacagcccccagttggaacttggaagccaacttttccatgtggccaaattcctttcacgtagaacatttgtaattgatccttgttgcttagggtagttccaaaatagctgattgctaactatcttattttgaaaagctttaaatatgttcatatactgtttcgagctttagatactgcagacaggataagttcgtgccgtgggctgggagcaggggcggagccacgttgtaagttctgggtgcggccgcacccagaaaaatttcaaaatcagttatagctataaattttcattctatttggttgaacatcatacatatgttatgaagtgctacaccccctattgtttttctctagcttcgcccctggctgggagaatcgtttactcagtagagtaacatgctatgttgttatcagcataatgaaaatatgttgaataagaaattgtctctttaagcttagacatgctgcagctagttagaatgtaatatcgaactgccttgtctggaaagaaatatataacaaaagctacatgctcggttaggtggtgctaatattgcaatttgagtttgttctgcttgttaaatgagcatatacaatctttggtaacagcagttggtacttttctgtttcatgactttatagctttgtagtcaagtgtatgtgactgtttgcacacaagtttctgaaggctctgatacatgttatctgctgctgtggtctgatctttctctgtctgagatgcaggacatc

SEQ ID NO: 653 - DNA, 587 bp, Setaria italica
  source 1..587: mol_type = genomic DNA
attcaggtacgggtgctgataaaaaactaatcttccatgtctttactgtaatagaggtcgatcagactgcggatacgcctcttccgcgggggaaatcgagtgtttcttcacttgatttgtgccgttcttggccgtcctgttagcctttccggttggatttgacgcagaggtggagagtagtgttggatcggatttttgggggaactgaagttttgggtgctcttgggaggcatgggaaagtttttttttttatgcgtggtggttggggaagtacggtgatcggctttttagttccataagaatttttcctttttatgcagaccattatctagaacatgtgggtgataaagattctagatttgctattttttttagcgtgagttggattgctagactactacgcttacaagtttttgagtagttggtgaacggtgtataacttgttcacatttgtgtagctgaactgctattgttgcagagcataaaattgttcaccttttagttctgctatagaaatggttttataactggtaaattttatggtgcttttagctgatccagttaagcttacccttttgcagaattgc

SEQ ID NO: 654 - DNA, 381 bp, Setaria italica
  source 1..381: mol_type = genomic DNA
ttgctggtgaggactccctagctcacctggatgctcccttcggtttgttctgtggaatagtcctttgtttgctgcgagttcccaaatccgtcgttctggtatggatgcgtcgatccatctagtgtgttgcagattcatgttttgcgcggtggagtagtaatagcagtatgtattccaaattttctggtcttcagcaactgaatcgattcccctcgttaagtccgcccgtgctttagtttggaagatgttgtgattgctttgttttcccggactaattagtagggtgaagaaatatctcctttcctgttccttgtttttgttcaggcgatgtatctgttgcaagttctgtgatttgattcgagtttctgttcatagcaaaca

SEQ ID NO: 655 - DNA, 381 bp, Setaria italica
  source 1..381: mol_type = genomic DNA
ctgctggtgaggactccctagctcacctggatgctcccttcggtttgttctgtggaatagtcctttgtttgctgcgagttcccaaatccgtcgttctggtatggatgcgtcgatccatctagtgtgttgcagattcatgttttgcgcggtggagtagtaatagcagtatgtattccaaattttctggtcttcagcaactgaatcgattcccctcgttaagtccgcccgtgctttagtttggaagatgttgtgattgctttgttttcccggactaattagtagggtgaagaaatatctcctttcctgttccttgtttttgttcaggcgatgtatctgttgcaagttctgtgatttgattcgagtttctgttcatagcaacac

SEQ ID NO: 656 - DNA, 101 bp, Setaria italica
  source 1..101: mol_type = genomic DNA
caatgggtatgtcatttggctcatcttttttgttgaaccatgcatctacttcctgctgttccaggttctcatgctgtgctgcattcactatacagcaaggg

SEQ ID NO: 657 - DNA, 708 bp, Setaria italica
  source 1..708: mol_type = genomic DNA
tcttcggtacgtgcctggcgcccttctcctcgtttcacttcggacttagtagaacgcttactagcattgcttaatttcttgcgtgttcgcgtagtcgatttgtctagttattcgtcggagatttccattgaatccttgcgcgtaagatgtttgtagacctattggagtttgtttttactgtagcaagcattatctgctctgttactatgggcgacacgagtagcagtaaccattgggaagtgatttgttcagtgcgaatagtagctgcttgtttatgcacactatatgagtaggattaaccattaagaagaacatatgtgtgaaatttgttgatcagaattaggtgctgcagtctatcctctgtttctaaaatttattagtactagttgcaatcagtttttttcgattggagctgtaatcagtaattaccgtcagttttcattagcatctggtgtagatgctactctagatctgcttagatggattgcgtgctattacatttttgaactaaaattttactgaaatgatgacttaccttggtaaattttcctattactgtagtaaatttcagattgcattggtggaattcgttgatctctgaaagctgaatgaagagttgatgttggttactgtagttgatgtttttctgccgtgatttgacggtcaaactgactgtgttgttgctcgtccctttggatgcagacgcga

SEQ ID NO: 658 - DNA, 708 bp, Setaria italica
  source 1..708: mol_type = genomic DNA
acttcggtacgtgcctggcgcccttctcctcgtttcacttcggacttagtagaacgcttactagcattgcttaatttcttgcgtgttcgcgtagtcgatttgtctagttattcgtcggagatttccattgaatccttgcgcgtaagatgtttgtagacctattggagtttgtttttactgtagcaagcattatctgctctgttactatgggcgacacgagtagcagtaaccattgggaagtgatttgttcagtgcgaatagtagctgcttgtttatgcacactatatgagtaggattaaccattaagaagaacatatgtgtgaaatttgttgatcagaattaggtgctgcagtctatcctctgtttctaaaatttattagtactagttgcaatcagtttttttcgattggagctgtaatcagtaattaccgtcagttttcattagcatctggtgtagatgctactctagatctgcttagatggattgcgtgctattacatttttgaactaaaattttactgaaatgatgacttaccttggtaaattttcctattactgtagtaaatttcagattgcattggtggaattcgttgatctctgaaagctgaatgaagagttgatgttggttactgtagttgatgtttttctgccgtgatttgacggtcaaactgactgtgttgttgctcgtccctttggatgcaggcgcgg

SEQ ID NO: 659 - DNA, 1529 bp, Setaria italica
  source 1..1529: mol_type = genomic DNA
tctttggtaagcacgtcccctccattcctctgtttttttatgcaatccgcgtggtcgagtttaatctcgtggttatctacataatgtggattttgtgtggtagatccgtttgttgtgcttgatccattgctagttttttttagctaaaagcgaattgtttggtgtgtccgctatgagctgtttaagtctgcatagatctgatctggaatgcagtttcgttttctagtctgttcacatgacatatgattggatctaggaatttcgtaaatttgtctgaaaaatgtactatatttgactgtatttttaccgtggatgatgtattttcctttatcactaccttttacgtatttgtttgttcacgtgtagactgcacatttgttttttcggtttggagatattaaatcaatggtagatgtacatgtagggttgacacatccgcaaaattgtcactgctcttctctcggcaatacagaaactgctcttgatctttgatgaattgctttgtcattgatctataaaaaacatgcattttactttatgtacagtgtacaaaagagttatttttatctgtgctcgagttcccataggacacttattgccacgctattgctctctaggacttattatgattacacacacatggataatgtgtgtaacgacaactcgtgtcataatgtggcaaggtgtatcttttgtatatcgttttctaagtcgttgtatggtcataggattaactttgttttgtttaaataggccaatactttgctagctcagtgctttctgtatcagtcatagcccctaagtcatagacagtttatttggaattattcactgtgttgctgcaagttggagttattataatttttggcagcttctggacattatctagttactaataactatatagaattcagagtgcgtgtttggaactattctatattttattcatgcacggaaatgaagtatagcttaccttttctatggctatgtataagagcatgacaactttgagtgtgggttctgttatgctttattaagctcttctgggtctggataatttgtttaaagttgccaattaagtatgatcttcaattcgtcatgtatatccggtacttcaattatatagcaatctttaatgctgatgctattttagaaattaagttgcacatccaatccctattccctaagcaagtagatatgttctccatcacacaagatgttactgttaatgaaatgctcttgttatgttggtaccttacatattgttcaaactgtttgaggtattatgatatcttgcatcacctggtccactatatctttagaaattcaaaacaaatgaagtagtaatattctaatattttttttgaaccaacaccttttttttaatctctgacattatcaatagtgaaattcggtttactttatgtcttcgggtaaggctgtaggtatggatatatcagatttatgaaatgtaacattcaaatgatgattctgattatgactctttttatgaaattctgcagatgcta

SEQ ID NO: 660 - DNA, 1532 bp, Setaria italica
  source 1..1532: mol_type = genomic DNA
tctttggtaagcacgtcccctccattcctctgtttttttatgcaatccgcgtggtcgagtttaatctcgtggttatctacataatgtggattttgtgtggtagatccgtttgttgtgcttgatccattgctagttttttttagctaaaagcgaattgtttggtgtgtccgctatgagctgtttaagtctgcatagatctgatctggaatgcagtttcgttttctagtctgttcacatgacatatgattggatctaggaatttcgtaaatttgtctgaaaaatgtactatatttgactgtatttttaccgtggatgatgtattttcctttatcactaccttttacgtatttgtttgttcacgtgtagactgcacatttgttttttcggtttggagatattaaatcaatggtagatgtacatgtagggttgacacatccgcaaaattgtcactgctcttctctcggcaatacagaaactgctcttgatctttgatgaattgctttgtcattgatctataaaaaacatgcattttactttatgtacagtgtacaaaagagttatttttatctgtgcctcgagttcccataggacacttatttgccacgctattgctctctaggacttattatgattacacacacatggatatggtgtgtaacgacaaactcgtgtcataatgtggcaaggtgtatcttttgtatatcgttttctaagtcgttgtatggtcataggattaactttgttttgtttaaataggccaatactttgctagctcagtgctttctgtatcagtcatagcccctaagtcatagacagtttatttggaattattcactgtgttgctgcaagttggagttattataatttttggcagcttctggacattatctagttactaataactatatagaattcagagtgcgtgtttggaactattctatattttattcatgcacggaaatgaagtatagcttaccttttctatggctatgtataagagcatgacaactttgagtgtgggttctgttatgctttattaagctcttctgggtctggataatttgtttaaagttgccaattaagtatgatcttcaattcgtcatgtatatccggtacttcaattatatagcaatctttaatgctgatgctattttagaaattaagttgcacatccaatccctattccctaagccaagtagatatgttctccatcacacaagatgttactgttaatgaatgctcttgttatgttggtaccttacatattgttcaaactgtttgaggtattatgatatcttgcatcacctggtccactatatctttagaaattcaaaacaaatgaagtagtaatattctaatattttttttgaaccaacaccttttttttaatctctgacattatcaatagtgaaattcggtttactttatgtcttcgggtaaggctgtaggtatggatatatcagatttatgaaatgtaacattcaaatgatgattctgattatgactctttttatgaaattctgcagatgcta

SEQ ID NO: 661 - DNA, 1532 bp, Setaria italica
  source 1..1532: mol_type = genomic DNA
actctggtaagcacgtcccctccattcctctgtttttttatgcaatccgcgtggtcgagtttaatctcgtggttatctacataatgtggattttgtgtggtagatccgtttgttgtgcttgatccattgctagttttttttagctaaaagcgaattgtttggtgtgtccgctatgagctgtttaagtctgcatagatctgatctggaatgcagtttcgttttctagtctgttcacatgacatatgattggatctaggaatttcgtaaatttgtctgaaaaatgtactatatttgactgtatttttaccgtggatgatgtattttcctttatcactaccttttacgtatttgtttgttcacgtgtagactgcacatttgttttttcggtttggagatattaaatcaatggtagatgtacatgtagggttgacacatccgcaaaattgtcactgctcttctctcggcaatacagaaactgctcttgatctttgatgaattgctttgtcattgatctataaaaaacatgcattttactttatgtacagtgtacaaaagagttatttttatctgtgcctcgagttcccataggacacttatttgccacgctattgctctctaggacttattatgattacacacacatggatatggtgtgtaacgacaaactcgtgtcataatgtggcaaggtgtatcttttgtatatcgttttctaagtcgttgtatggtcataggattaactttgttttgtttaaataggccaatactttgctagctcagtgctttctgtatcagtcatagcccctaagtcatagacagtttatttggaattattcactgtgttgctgcaagttggagttattataatttttggcagcttctggacattatctagttactaataactatatagaattcagagtgcgtgtttggaactattctatattttattcatgcacggaaatgaagtatagcttaccttttctatggctatgtataagagcatgacaactttgagtgtgggttctgttatgctttattaagctcttctgggtctggataatttgtttaaagttgccaattaagtatgatcttcaattcgtcatgtatatccggtacttcaattatatagcaatctttaatgctgatgctattttagaaattaagttgcacatccaatccctattccctaagccaagtagatatgttctccatcacacaagatgttactgttaatgaatgctcttgttatgttggtaccttacatattgttcaaactgtttgaggtattatgatatcttgcatcacctggtccactatatctttagaaattcaaaacaaatgaagtagtaatattctaatattttttttgaaccaacaccttttttttaatctctgacattatcaatagtgaaattcggtttactttatgtcttcgggtaaggctgtaggtatggatatatcagatttatgaaatgtaacattcaaatgatgattctgattatgactctttttatgaaattctgcaggtgctc

SEQ ID NO: 662 - DNA, 1806 bp, Setaria italica
  source 1..1806: mol_type = genomic DNA
tctttggtgagcacctcctcgatccccctcgctacttgctcttcgtcagatctgttttgtttggcgcgacttgtacttcgatctggtcgatctgtcgctgctttggctggatctgtgttagtgctaggtttgtttatgctgttggtcagatccaatatagtttttgcttggatctagcatagttccttttgacttagatccgttactagttgtattaagtttgtgttggtatcgagatccgtagtctgtagcacctagtcgtgtgtggccagatgccataattttttatagtacctgacatcaacacttcaatctgttgttacagtagatcttgtgaaatttgtttgtcctatgctgctcttatgttagatctgttaatacttaaagggctatgccatatcctatcttaagcgaagtttaaaccacgtagcctgatactttgttaaagcatttgtttttgtctgttatgcttgcttccttgatataagctgacagttatcagtgcatcattattagattatttcttgtctgaatgatttgtcccccacctattgtgttgactcggatttgttgcatttcggtgattatgtagacgatttgttataaaagcatttgatcagttgtttaaagagtagcatattttatttgtcaactcttgagctggcagattaatgatgaaacaattaccccaagcgctttattccactgatttcagtgtgatggaaagctatgttatcatagcttttgtggttttcaatctgaaacatctgcagttcaagcattacttaacttttcagtttttttcctttgatgttatgctagtatttttttgcttcttcctcttgtgtcaaacaaaattaagtttattagaataatgtttggaatctcttgggttcagtaatgagagaagtgatgagatcatatccacacgagatatctgcattcattatgatgatcactatcatgcactaccatctgatctctcatcactgttttaattttttgttttcattagaaacttttgattccctagtttctttgaatattgaccagtaaatttaaagggtattcatcttatgtggtttgcaacaccacatttcctaataagttctctgttttaaatgttcttgtgagtctgacattcatctcaaagtttactaggatagtagtcacacattgctgttcaatcttaatggggaaatgatgataccatatccacacgagatatctgcagtcattatgatgatcacatcatgcactaccatctgatatccttgtttgtccatattacttccattattatttttttaatacttgagttgaaaagtttcatttttatgtgcaatctgtgatgcaactattcccattacatgaatcactgtgattattatgaaaaaaatcaccatctttcggctgagattgcacaacctaagttacattttcttaaattacatactatttgtttctttacattttgcaatcaaatgccatttggtatctgatgcacagtctttttgggctgtgtgtctcgaaaacgtggcaaaaaaactaggggaacgggatcttgcgacactggtcactcattttatgagcttccagttactatatgcccgttttacattaatactagtattatgatatctttggtcagatctttgcaatatgttgttgtagtgttgactgcaaaactgatgtgcatacatttgattagttaggttcagttatgtacacagtgatttatttgtatgcttatgtagcatttgaaatgttgcaatctctgacaaaattgttctcatgcagatgcca

SEQ ID NO: 663 - DNA, 899 bp, Setaria italica
  source 1..899: mol_type = genomic DNA
tcttcggtacgtgctcgctgctccgactcctccagcttttgttggtgctgcgtttctgtgaatgcttacggcctctaggatacgtgactggtttagttagatttagattaacctctgaaattcgattcgtaaatctccgtgctgattataccgtgttctctagatagatgctaacgtaataacagtaggaatcaatgatagaaccttcccagaattatgtttgtgatagaacatacaatttgtttctaaaataacagagagagacatacaatttagtgcttaaatttagattcagaaattttctgtaaaatacattttgggtgcttagtggtatgtttaacatctgctaattttagatttagagttctgttaaatttagcagcagggattcatagtccaggttaattgtatagtcgtttggtccgtcgagcttattttgtgacgaaattagataaataaacaactccttgctgtaatggtctcctgttattgcttgaagaaataaataactgagagcatttcaacgcattgctctgctcgttttttgttgtgaatttgtttgttgcctgaagaaataaataattaagtgatggattgctctgctcatttattgggacaacgtctattaagcagagcaacttgttgtaattttttgttgctgtgctttgtctgctgtcaatgaaacagggttaactgatagtctgacaggttacatatgcttgttgtgacatgttgcaagcctttagatctctgtttgctgtaattctgaagttgaattgagtggcactctgttctgtgtaattccgaataagttgaattgattggaagagatctccttcttcctgataatgaatactgtgaactcacaatcttgttcgttctttatattgcagatgcaa

SEQ ID NO: 664 - DNA, 899 bp, Setaria italica
  source 1..899: mol_type = genomic DNA
acttcggtacgtgctcgctgctccgactcctccagcttttgttggtgctgcgtttctgtgaatgcttacggcctctaggatacgtgactggtttagttagatttagattaacctctgaaattcgattcgtaaatctccgtgctgattataccgtgttctctagatagatgctaacgtaataacagtaggaatcaatgatagaaccttcccagaattatgtttgtgatagaacatacaatttgtttctaaaataacagagagagacatacaatttagtgcttaaatttagattcagaaattttctgtaaaatacattttgggtgcttagtggtatgtttaacatctgctaattttagatttagagttctgttaaatttagcagcagggattcatagtccaggttaattgtatagtcgtttggtccgtcgagcttattttgtgacgaaattagataaataaacaactccttgctgtaatggtctcctgttattgcttgaagaaataaataactgagagcatttcaacgcattgctctgctcgttttttgttgtgaatttgtttgttgcctgaagaaataaataattaagtgatggattgctctgctcatttattgggacaacgtctattaagcagagcaacttgttgtaattttttgttgctgtgctttgtctgctgtcaatgaaacagggttaactgatagtctgacaggttacatatgcttgttgtgacatgttgcaagcctttagatctctgtttgctgtaattctgaagttgaattgagtggcactctgttctgtgtaattccgaataagttgaattgattggaagagatctccttcttcctgataatgaatactgtgaactcacaatcttgttcgttctttatattgcaggtgcac

SEQ ID NO: 665 - DNA, 144 bp, Setaria italica
  source 1..144: mol_type = genomic DNA
tcttcggtaagtacagcgccatcgatctatcttgttgagttgttaggcgtacgtgttttttttatcttgtttgttcgatccgttcaaattgacgtggggtgcgggatctcagactttgcgtggttcgatctgttgcagatgcca

SEQ ID NO: 666 - DNA, 144 bp, Setaria italica
  source 1..144: mol_type = genomic DNA
acttcggtaagtacagcgccatcgatctatcttgttgagttgttaggcgtacgtgttttttttatcttgtttgttcgatccgttcaaattgacgtggggtgcgggatctcagactttgcgtggttcgatctgttgcaggtgccg

SEQ ID NO: 667 - DNA, 357 bp, Setaria italica
  source 1..357: mol_type = genomic DNA
tctttggtaagtcttcctcttccgcgcctttttgggaataattctagtttcgtggttgtggtgtcaaaacgaactagttatatgatgatgatcggtgaccataatgaataagtcagaacaaatctgctgtatcactcagttatcacaattgcacggctccatgctctgctcccactactctgttttttttgctggcagagcagcgctaaattttttatctctagtaaaaaactagatgcaccttttcacaatagtgaaatttgttagcacagaataggagtatttataacacagaaaattgtgattatccactgcgactagtctcttaaccactctgcttctgccatgcagacgcca

SEQ ID NO: 668 - DNA, 357 bp, Setaria italica
  source 1..357: mol_type = genomic DNA
actctggtaagtcttcctcttccgcgcctttttgggaataattctagtttcgtggttgtggtgtcaaaacgaactagttatatgatgatgatcggtgaccataatgaataagtcagaacaaatctgctgtatcactcagttatcacaattgcacggctccatgctctgctcccactactctgttttttttgctggcagagcagcgctaaattttttatctctagtaaaaaactagatgcaccttttcacaatagtgaaatttgttagcacagaataggagtatttataacacagaaaattgtgattatccactgcgactagtctcttaaccactctgcttctgccatgcaggcgccg

SEQ ID NO: 669 - DNA, 345 bp, Setaria italica
  source 1..345: mol_type = genomic DNA
gtaagtcttcctcttccgcgcctttttgggaataattctagtttcgtggttgtggtgtcaaaacgaactagttatatgatgatgatcggtgaccataatgaataagtcagaacaaatctgctgtatcactcagttatcacaattgcacggctccatgctctgctcccactactctgttttttttgctggcagagcagcgctaaattttttatctctagtaaaaaactagatgcaccttttcacaatagtgaaatttgttagcacagaataggagtatttataacacagaaaattgtgattatccactgcgactagtctcttaaccactctgcttctgccatgcag

SEQ ID NO: 670 - DNA, 1804 bp, Setaria italica
  source 1..1804: mol_type = genomic DNA
tctttggtgagcacctcctcgatccccctcgctacttgctcttcgtcagatctgttttgtttggcgcgacttgtacttcgatctggtcgatctgtcgctgctttggctggatctgtgttagtgctaggtttgtttatgctgttggtcagatccaatatagtttttgcttggatctagcatagttccttttgacttagatccgttactagttgtattaagtttgtgttggtatcgagatccgtagtctgtagcacctagtcgtgtgtggccagatgccataattttttatagtacctgacatcaacacttcaatctgttgttacagtagatcttgtgaaatttgtttgtcctatgctgctcttatgttagatctgttaatacttaaagggctatgccatatcctatcttaagcgaagtttaaaccacgtagcctgatactttgttaaagcatttgtttttgtctgttatgcttgcttccttgatataagctgacagttatcagtgcatcattattagattatttcttgtctgaatgatttgtccccccacctattgtgttgactcggattttgttgcatttcggtgatttatgtagacgatttgttataaaagcatttgatcagttgtttaaagagtagcatattttatttgtcaactcttgagctggcagattaatgatgaaacaattaccccaagcgctttattccactgatttcagtgtgatggaaagctatgttatcatagcttttgtggttttcaatctgaaacatctgcagttcaagcattacttaacttttcagtttttttcctttgatgttatgctagtatttttttgcttcttcctcttgtgtcaaacaaaattaagtttattagaataatgtttggaatctcttgggttcagtaatgagagaagtgatgagatcatatccacacgagatatctgcattcattatgatgatcactatcatgcactaccatctgatctctcatcactgttttaattttttgttttcattagaaacttttgattccctagtttctttgaatattgaccagtaaatttaaagggtattcatcttatgtggtttgcaacaccacatttcctaataagttctctgttttaaatgttcttgtgagtctgacattcatctcaaagtttactaggatagtagtcacacattgctgttcaatcttaatggggaaatgatgataccatatccacacgagatatctgcagtcattatgatgatcacatcatgcactaccatctgatatccttgtttgtccatattacttccattattatttttttaatacttgagttgaaaagtttcatttttatgtgcaatctgtgatgcaactattcccattacatgaatcactgtgattattatgaaaaaaatcaccatctttcggctgagattgcacaacctaagttacattttcttaaattacatactatttgtttctttacattttgcaatcaatgccatttggtatctgatgcacagtcttttttggctgtgtgtctcgaaacgtggcaaaaaactagggggaacggatcttgcgacactggtcactcatttatgagcttccagttactatatgcccgtttacattaatactagtattatgatatctttggtcagatctttgcaatatgttgttgtagtgttgactgcaaaactgatgtgcatacatttgattagttaggttcagttatgtacacagtgatttatttgtatgcttatgtagcatttgaaatgttgcaatctctgacaaaattgttctcatgcagatgcca

SEQ ID NO: 671 - DNA, 1801 bp, Setaria italica
  source 1..1801: mol_type = genomic DNA
tctttggtgagcacctcctcgatccccctcgctacttgctcttcgtcagatctgttttgtttggcgcgacttgtacttcgatctggtcgatctgtcgctgctttggctggatctgtgttagtgctaggtttgtttatgctgttggtcagatccaatatagtttttgcttggatctagcatagttccttttgacttagatccgttactagttgtattaagtttgtgttggtatcgagatccgtagtctgtagcacctagtcgtgtgtggccagatgccataattttttatagtacctgacatcaacacttcaatctgttgttacagtagatcttgtgaaatttgtttgtcctatgctgctcttatgttagatctgttaatacttaaagggctatgccatatcctatcttaagcgaagtttaaaccacgtagcctgatactttgttaaagcatttgtttttgtctgttatgcttgcttccttgatataagctgacagttatcagtgcatcattattagattatttcttgtctgaatgatttgtcccccacctattgtgttgactcggatttgttgcatttcggtgattatgtagacgatttgttataaaagcatttgatcagttgtttaaagagtagcatattttatttgtcaactcttgagctggcagattaatgatgaaacaattaccccaagcgctttattccactgatttcagtgtgatggaaagctatgttatcatagcttttgtggttttcaatctgaaacatctgcagttcaagcattacttaacttttcagtttttttcctttgatgttatgctagtatttttttgcttcttcctcttgtgtcaaacaaaattaagtttattagaataatgtttggaatctcttgggttcagtaatgagagaagtgatgagatcatatccacacgagatatctgcattcattatgatgatcactatcatgcactaccatctgatctctcatcactgttttaattttttgttttcattagaaacttttgattccctagtttctttgaatattgaccagtaaatttaaagggtattcatcttatgtggtttgcaacaccacatttcctaataagttctctgttttaaatgttcttgtgagtctgacattcatctcaaagtttactaggatagtagtcacacattgctgttcaatcttaatggggaaatgatgataccatatccacacgagatatctgcagtcattatgatgatcacatcatgcactaccatctgatatccttgtttgtccatattacttccattattatttttttaatacttgagttgaaaagtttcatttttatgtgcaatctgtgatgcaactattcccattacatgaatcactgtgattattatgaaaaaaatcaccatctttcggctgagattgcacaacctaagttacattttcttaaattacatactatttgtttctttacattttgcaatcaatgccatttggtatctgatgcacagtcttttttggctgtgtgtctcgaaacgtggcaaaaaactagggggaacggatcttgcgacactggtcactcatttatgagcttccagttactatatgcccgtttacattaatactagtattatgatatctttggtcagatctttgcaatatgttgttgtagtgttgactgcaaaactgatgtgcatacatttgattagttaggttcagttatgtacacagtgatttatttgtatgcttatgtagcatttgaaatgttgcaatctctgacaaaattgttctcatgcagatgcca

SEQ ID NO: 672 - DNA, 1801 bp, Setaria italica
  source 1..1801: mol_type = genomic DNA
actctggtgagcacctcctcgatccccctcgctacttgctcttcgtcagatctgttttgtttggcgcgacttgtacttcgatctggtcgatctgtcgctgctttggctggatctgtgttagtgctaggtttgtttatgctgttggtcagatccaatatagtttttgcttggatctagcatagttccttttgacttagatccgttactagttgtattaagtttgtgttggtatcgagatccgtagtctgtagcacctagtcgtgtgtggccagatgccataattttttatagtacctgacatcaacacttcaatctgttgttacagtagatcttgtgaaatttgtttgtcctatgctgctcttatgttagatctgttaatacttaaagggctatgccatatcctatcttaagcgaagtttaaaccacgtagcctgatactttgttaaagcatttgtttttgtctgttatgcttgcttccttgatataagctgacagttatcagtgcatcattattagattatttcttgtctgaatgatttgtcccccacctattgtgttgactcggatttgttgcatttcggtgattatgtagacgatttgttataaaagcatttgatcagttgtttaaagagtagcatattttatttgtcaactcttgagctggcagattaatgatgaaacaattaccccaagcgctttattccactgatttcagtgtgatggaaagctatgttatcatagcttttgtggttttcaatctgaaacatctgcagttcaagcattacttaacttttcagtttttttcctttgatgttatgctagtatttttttgcttcttcctcttgtgtcaaacaaaattaagtttattagaataatgtttggaatctcttgggttcagtaatgagagaagtgatgagatcatatccacacgagatatctgcattcattatgatgatcactatcatgcactaccatctgatctctcatcactgttttaattttttgttttcattagaaacttttgattccctagtttctttgaatattgaccagtaaatttaaagggtattcatcttatgtggtttgcaacaccacatttcctaataagttctctgttttaaatgttcttgtgagtctgacattcatctcaaagtttactaggatagtagtcacacattgctgttcaatcttaatggggaaatgatgataccatatccacacgagatatctgcagtcattatgatgatcacatcatgcactaccatctgatatccttgtttgtccatattacttccattattatttttttaatacttgagttgaaaagtttcatttttatgtgcaatctgtgatgcaactattcccattacatgaatcactgtgattattatgaaaaaaatcaccatctttcggctgagattgcacaacctaagttacattttcttaaattacatactatttgtttctttacattttgcaatcaatgccatttggtatctgatgcacagtcttttttggctgtgtgtctcgaaacgtggcaaaaaactagggggaacggatcttgcgacactggtcactcatttatgagcttccagttactatatgcccgtttacattaatactagtattatgatatctttggtcagatctttgcaatatgttgttgtagtgttgactgcaaaactgatgtgcatacatttgattagttaggttcagttatgtacacagtgatttatttgtatgcttatgtagcatttgaaatgttgcaatctctgacaaaattgttctcatgcaggtgccg

SEQ ID NO: 673 - DNA, 1052 bp, Setaria italica
  unsure 662: note = unsure at all n locations
  source 1..1052: mol_type = genomic DNA
ctcgaggtgagtctactgtctacatatccatcatcccggttagcttttgcgatcgaggatcctgatcctgtgcacatccttcctgctcaggaggtataacgctaccagttttaggtgcttctctttagatgcatggtatttccgttgatttgttcctgggtcttatttctccgtgtcccacttggatgtttgcccgtgttctacatgggctcgctagtagttatgcgagttcactatcgcctagtcctgctatgttggctactttgctattagatttcagttctgctatactagtgcgagggcctgtcgttacatcttatttaaaacagtgaatccatggtgttccatcttgcacacaggactcgaattatttggcacaattaattcgatatttgatagatgttcatgagtctccacaattgaccattttttgtttatctatgctgttataatatgttgatgtacactatatctgttgataaagcccacttagctcagaggttagagcatcgcatttgtaatgcgagggtcatcggttcaaatccgatagtcggcttttttttccctattcatgttccctaaacagaatttctcttcttctctgargtaaattgggaatacagggtctgttatgtcattagaccttacaattttgctggatncaawtcataaaagtatatacaaaatatttggaagttgatgaaattacatttttggtgatacttttagtagattttactctgtatcctttggtttgattcagttagttttgatgtattctgtaatgtaaattgaatgcaatttattgtgtaaaatgaaattcaataaaacaaaaagcatgtcctgttaactgttatcgagggccttgtttaattagggcatcagtgtagaggtagatgtagttaatgaacagtagtatctcctctcttggatggtgacctctgcttggtctacttgactggatatgtggtctgttcactgatttatattttgatattttgaatcttaaaactgcatgttaatatttttgaatcttaaaactgcaggttaag

SEQ ID NO: 674 - DNA, 1053 bp, Setaria italica
  source 1..1053: mol_type = genomic DNA
ctcgaggtgagtctactgtctacatatccatcatcccggttagcttttgcgatcgaggatcctgatcctgtgcacatccttcctgctcaggaggtataacgctaccagttttaggtgcttctctttagatgcatggtatttccgttgatttgttcctgggtcttatttctccgtgtcccacttggatgtttgcccgtgttctacatgggctcgctagtagttatgcgagttcactatcgcctagtcctgctatgttggctactttgctattagatttcagttctgctatactagtgcgagggcctgtcgttacatcttatttaaaacagtgaatccatggtgttccatcttgcacacaggactcgaattatttggcacaattaattcgatatttgatagatgttcatgagtctccacaattgaccattttttgtttatctatgctgttataatatgttgatgtacactatatctgttgataaagcccacttagctcagaggttagagcatcgcatttgtaatgcgagggtcatcggttcaaatccgatagtcggcttttttttccctattcatgttccctaaacaagaatttctcttcttctctgaggtaaattgggaatacagggtctgttatgtcattagaccttacaattttgctggatacaaatcataaaagtatatacaaaatatttggaagttgatgaaattacatttttggtgatacttttagtagattttactctgtatcctttggtttgattcagttagttttgatgtattctgtaatgtaaattgaatgcaatttattgtgtaaaatgaaattcaataaaacaaaaagcatgtcctgttaactgttatcgagggccttgtttaattagggcatcagtgtagaggtagatgtagttaatgaacagtagtatctcctctcttggatggtgacctctgcttggtctacttgactggatatgtggtctgttcactgatttatattttgatattttgaatcttaaaactgcatgttaatatttttgaatcttaaaactgcaggttaag

SEQ ID NO: 675 - DNA, 91 bp, Setaria italica
  source 1..91: mol_type = genomic DNA
ccagaggtaactcatgatccatcgctcaatctgttatcatgttgttcatgcctctgctgatcggtgtcaacggctcctatgttagattttg

SEQ ID NO: 676 - DNA, 91 bp, Setaria italica
  source 1..91: mol_type = genomic DNA
ccagaggtaactcatgatccatcgctcaatctgttatcatgttgttcatgcctctgctgatcggtgtcaacggctcctatgttaggttctg

SEQ ID NO: 677 - DNA, 554 bp, Setaria italica
  source 1..554: mol_type = genomic DNA
cctcaggtaccgtttcttctcggctgctcctcgcttgatctatgctacttcatgctttcgcgactagattcgatgttgtattgtgccgcatcctcgtgctagtagtgatttggtcctctgatagtgattgcgttgttggtactcgcatgtccatttccctagggtttgtgggttatacgtgctcgctcggttctaggatttgactcttatggatggattcatctggatccggataattacatagattctgtaggttgatttgttagtcgtagttctggatcgaatgtttgtaggttagggttgctgcagttcctttattttgagaggcttttgctgtgtagttgatttgctgtgtagttgatgtatatgttaatagttgcagcgtctttgtttgatctattttctgatctgatctgtggaattgttctgtcactgcttttcatcattttgtttacactcctagcttgttagctggcctttaaattctgcgcagatacttgcttgtttgctctggttactgtttctaacaactgatttatctgatgcagcggttt

SEQ ID NO: 678 - DNA, 554 bp, Setaria italica
  source 1..554: mol_type = genomic DNA
cctcaggtaccgtttcttctcggctgctcctcgcttgatctatgctacttcatgctttcgcgactagattcgatgttgtattgtgccgcatcctcgtgctagtagtgatttggtcctctgatagtgattgcgttgttggtactcgcatgtccatttccctagggtttgtgggttatacgtgctcgctcggttctaggatttgactcttatggatggattcatctggatccggataattacatagattctgtaggttgatttgttagtcgtagttctggatcgaatgtttgtaggttagggttgctgcagttcctttattttgagaggcttttgctgtgtagttgatttgctgtgtagttgatgtatatgttaatagttgcagcgtctttgtttgatctattttctgatctgatctgtggaattgttctgtcactgcttttcatcattttgtttacactcctagcttgttagctggcctttaaattctgcgcagatacttgcttgtttgctctggttactgtttctaacaactgatttatctgatgcagggttcg

SEQ ID NO: 679 - DNA, 484 bp, Setaria italica
  source 1..484: mol_type = genomic DNA
cctcaggtaccgtttcttctcggccgctcctcgcttgatctgagctacttggtgcttctccgctgctcctcgcttgatctgtgctacttggtgctgtcgcggctggattgatgttctattgtgtcgcctcgcgcgagtagtgatttggtagtgattgagttgttgatgctcgcatctccgattccgtagggttcgtgggttttgcgtgctcgctggttaattatactactggatcgaacgtttagaggctagggctgctttaattcctttatttttgagagtctgctgctctgtagttgatgtatatactgatagttagtagcgtccttgcttgatctgttttccgatctgatctgtaaaattgttctcttactgcttttttatgtttttatatattagcaccttccttcaaattctgtgcagatacttgctcatttgccctgcttagtttttctaacaactgattcatctgatgaagcagttt

SEQ ID NO: 680 - DNA, 484 bp, Setaria italica
  source 1..484: mol_type = genomic DNA
cctcaggtaccgtttcttctcggccgctcctcgcttgatctgagctacttggtgcttctccgctgctcctcgcttgatctgtgctacttggtgctgtcgcggctggattgatgttctattgtgtcgcctcgcgcgagtagtgatttggtagtgattgagttgttgatgctcgcatctccgattccgtagggttcgtgggttttgcgtgctcgctggttaattatactactggatcgaacgtttagaggctagggctgctttaattcctttatttttgagagtctgctgctctgtagttgatgtatatactgatagttagtagcgtccttgcttgatctgttttccgatctgatctgtaaaattgttctcttactgcttttttatgtttttatatattagcaccttccttcaaattctgtgcagatacttgctcatttgccctgcttagtttttctaacaactgattcatctgatgaaggagttc

SEQ ID NO: 681 - DNA, 373 bp, Setaria italica
  source 1..373: mol_type = genomic DNA
cctcaggtttgtctcctcctcgtgctagtggtttggttgttcatactcgcttgcttcgaggatgtgattcttatggatggtttcatcggcattcagataattatttagattctataggttgatttgttaattgtgcttgtggatcgaatgtttagatgttggggctgttgtaattcctttgctttttgagttcgctgctatacagtaatatttttatttgacctagtttccgatctgatctgtaaattggtttgctactgcctttccaattgtttatgtattactggatttcaaattctgtgcagatgcgtgctctttttccatacttagtgtttctaacgattgactcatctgacatctgatgcagcggttt

SEQ ID NO: 682 - DNA, 373 bp, Setaria italica
  source 1..373: mol_type = genomic DNA
cctcaggtttgtctcctcctcgtgctagtggtttggttgttcatactcgcttgcttcgaggatgtgattcttatggatggtttcatcggcattcagataattatttagattctataggttgatttgttaattgtgcttgtggatcgaatgtttagatgttggggctgttgtaattcctttgctttttgagttcgctgctatacagtaatatttttatttgacctagtttccgatctgatctgtaaattggtttgctactgcctttccaattgtttatgtattactggatttcaaattctgtgcagatgcgtgctctttttccatacttagtgtttctaacgattgactcatctgacatctgatgcagggttgc

SEQ ID NO: 683 - DNA, 521 bp, Setaria italica
  source 1..521: mol_type = genomic DNA
cctcaggtacggtttcttctccgatgctcctcgcttgatctatggtacttggtgctgtcgcgactggatcgattttgtactctgtctcctcctcgtgctagtagggatctggccctctggtagtgattgcgttgttgatactcgcatctccgtttccgaagggtttgtgggttctgcgtgctcgcttgattctaggatttaactaattatggatgtattcatctggatccggataattcaattgatactgtaggttgatttgttaattgtactagtggatcgatgtttagaggttactgctgttgtaattcctttatctttgagaggcttttgctgtttagttgatgcatatgctaatagtttgcagcgtccttgtttgatctattttctgatatgatctgtagaattgttctgttactgcctttcatttttatattattactggccttcaagtactgcacagatacttgcccgtttgctctgtttagtgttcctaacttattcatctgatgcagcagttt

SEQ ID NO: 684 - DNA, 521 bp, Setaria italica
  source 1..521: mol_type = genomic DNA
cctcaggtacggtttcttctccgatgctcctcgcttgatctatggtacttggtgctgtcgcgactggatcgattttgtactctgtctcctcctcgtgctagtagggatctggccctctggtagtgattgcgttgttgatactcgcatctccgtttccgaagggtttgtgggttctgcgtgctcgcttgattctaggatttaactaattatggatgtattcatctggatccggataattcaattgatactgtaggttgatttgttaattgtactagtggatcgatgtttagaggttactgctgttgtaattcctttatctttgagaggcttttgctgtttagttgatgcatatgctaatagtttgcagcgtccttgtttgatctattttctgatatgatctgtagaattgttctgttactgcctttcatttttatattattactggccttcaagtactgcacagatacttgcccgtttgctctgtttagtgttcctaacttattcatctgatgcaggagttc

SEQ ID NO: 685 - DNA, 621 bp, Setaria italica
  source 1..621: mol_type = genomic DNA
ccgcgggtttgtgcctcctcgtgctagtagcaatttgacctttctggtagtttgatttgtttcttggtactcgcatctccgattccgtaggatttttgggttttgcgtgctaacttgcttcgaggattcgagtctcatgcatggtctcatctagatccggataatttcttagattctgtacgttgatttgttcattgtccttgtagatcgaatgcttagaggtggctgctgctttatagtcgatgcatatagtaatagtattgtttgatctagtttccgatctgaactgtaaaattgttttgttcctgcctttctaagtgtttatgtacttctggattttaaattctgcttagatatttgctcgtttgctctgtttagtgtttgtcacaattgattcatttattttcttttagaggctgcttctgtgtatccggttgtatagtttatgtttatatagttgcaacatccttgtttgatctagttcctgatctggtctgtaaattgttttgttactgccttgtaaaagtttttataatactggccttccgatttcagtgctgatacttgcttggttgctctgttttgtgtttctaacaattgactcatctgatgcagcggttt

SEQ ID NO: 686 - DNA, 620 bp, Setaria italica
  source 1..620: mol_type = genomic DNA
ccgcgggtttgtgcctcctcgtgctagtagcaatttgacctttctggtagtttgatttgtttcttggtactcgcatctccgattccgtaggatttttgggttttgcgtgctaacttgcttcgaggattcgagtctcatgcatggtctcatctagatccggataatttcttagattctgtacgttgatttgttcattgtccttgtagatcgaatgcttagaggtggctgctgctttatagtcgatgcatatagtaatagtattgtttgatctagtttccgatctgaactgtaaaattgttttgttcctgcctttctaagtgtttatgtacttctggattttaaattctgcttagatatttgctcgtttgctctgtttagtgtttgtcacaattgattcatttattttcttttagaggctgcttctgtgtatccggttgtatagtttatgtttatatagttgcaacatccttgtttgatctagttcctgatctggtctgtaaattgttttgttactgccttgtaaaagtttttataatactggcttccgatttcagtgctgatacttgcttggttgctctgttttgtgtttctaacaattgactcatctgatgcagcggttt

SEQ ID NO: 687 - DNA, 620 bp, Setaria italica
  source 1..620: mol_type = genomic DNA
ccgcgggtttgtgcctcctcgtgctagtagcaatttgacctttctggtagtttgatttgtttcttggtactcgcatctccgattccgtaggatttttgggttttgcgtgctaacttgcttcgaggattcgagtctcatgcatggtctcatctagatccggataatttcttagattctgtacgttgatttgttcattgtccttgtagatcgaatgcttagaggtggctgctgctttatagtcgatgcatatagtaatagtattgtttgatctagtttccgatctgaactgtaaaattgttttgttcctgcctttctaagtgtttatgtacttctggattttaaattctgcttagatatttgctcgtttgctctgtttagtgtttgtcacaattgattcatttattttcttttagaggctgcttctgtgtatccggttgtatagtttatgtttatatagttgcaacatccttgtttgatctagttcctgatctggtctgtaaattgttttgttactgccttgtaaaagtttttataatactggcttccgatttcagtgctgatacttgcttggttgctctgttttgtgtttctaacaattgactcatctgatgcagggttgc

SEQ ID NO: 688 - DNA, 126 bp, Setaria italica
  source 1..126: mol_type = genomic DNA
gcagcggtaagtttcacgtcttagcaaaaaattcgaggaacttttgcgatgtcttcttgcgttatttgcgttttttatgctactgattttttttatcattggttttcttgtgttgtgcagatctga

SEQ ID NO: 689 - DNA, 1190 bp, Setaria italica
  source 1..1190: mol_type = genomic DNA
gcgctcgtgagttccttcgcgcttccacctctgggttttgttcctgctgtttcagaagtggctctgtggttcatcgcgcatcggactgcctgtgcggatcctatggtggccgcggctgttgggctgatggggttttgatgcttgaggattcatgccatgtagttagcttgatgtacgcgggtcacttgggtgtggaaactgtagatgcgaacggggtgtggtaggctgcctagatcctcgactctgctttcggtcaggcgtgtcttcagtgaaacatcaccgatcccctggttcgtttcaacttcaacagcacaaaaaacttcggccttcagaaagtgcagcgataggtcatttgtccgcttcgcttctttacaaccgggggttaggggggtgatgccttagtgctaatgatgtgattcagagtcgctgacctactagtagaatggttgggtgtgcatttgtatagggcctttgacctttgatccagggtgatcatgatattttggtaggggtgtatacccgtttatgtgcaactcaagtagaataatgtatttgaaccattggattcaattaggagctaatatctggtcatcccaacccaagtcattttaagctttctggtccttagttgtaattgagttgtaagttttgaggaattgttgcacacatagcagtctcttttgggtgaccttgaaaggaaaataagggtgttttagagtgtttatcatgatgcagctcagctacagtgcgtaggaggaattgaagttgagaggtgaagcatgaattgtggtttattttgataatttcgcagttaggcaattcaaaacaagtactgtttgctattctagtcccacctgcacattcctttacctagttgtatttctaaaccatcttgattggcttaatttgcatgataaatgctcctatgtcttgttgggaaacagagatttcactgaccatttccgagtataaacacacaatctgggcaattggtgtctttgcttgtgtatttttccctactatagtgaaacacatctgtcaagtggataatgtttatgttctggttcttcacttagataatggtctagatgtcattacttggcttgcatgtgtaccattaaattaacattcacagaggacttccaatttttaactctatgtctaatataattttcgttgcataggtattg

SEQ ID NO: 690 - DNA, 3284 bp, Setaria italica
  source 1..3284: mol_type = genomic DNA
gcgcttgtaagtgtttctacgtttgagccttttttgtgcactacctggtatctttgggtgcttagatttgatgtgctagatgcgtttaattagctaacttggattagcgaggttgttagcttgtagtttggacttggtgtggtgtggcaagttattttcttgtaaattaattacgttcatgggcttctgtgggctgtagaagctacagcaaggattttttttttatctgtctcgagttcagataaaatttgggcgcaaaattatcccactttgcatgctttccttctcgcagaggatgggggtgctcccatttgaatgttagagattgaattcatttgcatccttgttgtagttaggaaaatgatgattgcctgtagaatggcttgtcttatacaaaccatgcatgagcttattgacttggggacttagacatctttcattacattcttattgagatggtatgataagattggtgttgtcatgtactccctccgttccaaattataggtcgtttggacttttttagattcatatattttgctatgcacttagatatacactacgtgtatatgcatagcacaagctatgtatctagaaaagctaaaacaaactataatttgggacagaggaagtagcaaacacctcccagcagttctttgatgtactaaatttgtgtactgcctagctattaattgaagacttgtggtcaattctttcccaattcgtttaaggattccacatatctccagctgtgatttgcatagtggttttctttcaacatgatttggtgtattgatttgctgcatgctaattaattagaaatttttcagacagaaggcatagctgcctttaagctgagctgagaaattgtatcttggatattattttactgccctcgatggtttccaccaatcagagcgcctttgtcaggggaagaaatatccatgacaacttcctgtttgtccaacaaatggtgaaatccttgcacatgaagagagaggctcatattctcctcaagctggatatttctaaagcattcgactcggtttcatggtcctttctcctggaggttatgaggcagttgggttttggacagagatggcgggacatgttatgtctaatcttgtcgacctcgtccactcgtgtgttagtgaatggggagccaggggaatctattcttcatagccgaggtcttcgttagggtgatccactctctcccatgctcttcatactggtcatggacgtcctaaattctctcatggagtacgcggctagagagagattgcttcagccacttgctgttcagcaagctcggcatcgggtctccttttttgctgatgatgctgtgattttcctaaggcccgggaggactgatctgcaagtaatcagaagcatccttgacctgtttggacacacttccggcctccacactaatctggtgaaaagttctgtttctcccatacactgttcagaggaagagatgcttatcactgctgaagtcttgtcgtgtgctgtaaaggaactcccatgcatgtatcttggtttgcctctttctattcataagcccaccagagaagtgctcttgcctttgattgacaaagtagctgatcatttgcctgggtggaaagcatccctgatgaacagagcaggtcggttggtaatggttaggatggttttatccgccactcccatttattccttgatagctcttgatttgccaaattgggtgtttaaaaccatggataaaaggaggagaggtttcttttggaaaggtcaggacaagccaatgttggtaactgcctagggtcctgggaaagagttcagcggccccgggaaaatggagggatggggaattcataatcctggaactctttggttgggcattggcgtattcgaatgttgggaattcagaaaactgaattcctttccggccttgggctggattccaaattcaagcttcctcattatgccccagcctgtttaaggtagcagtcgaccatattggtggcaaatggtgttttcactcttttctggaaaagataggtggggtaattggtcacactatcgaggagttggctcccaacctgttcaaggccatccccaaaagggcaattagaagacagacagtagcccaagctcttgttaatcgaagctggttggcagacatcaaaggcgcacttacagttcaggttttattggaatatctccagatttgggaccatgttgagggagttgtcctgcagcaagatgttccagatcagctcagatggaaactcacacagaatggcgtatacagcagcaagtcagcctatgctgccttctttgttggaaccattaaatttgctccttggaggaggatttggaagagtttcgccccttcgttgcaaattcttcatttggttagccatcaacaatagatgttggacagcggaccgtcttgccaaacgaggattgcctcaccctgaggtctgtcctttttgtgatcaagaggaggaaaccattcagcatctgttagtcggctgtgtatttacaaggcagatttggaccttgatcctccaacctctacaactgacagccctgataccctcaccttctgaggctcgtttttctttttggtggaggaaggcattgcgctcagtacctaaggagataaggaaagggcttaactcgctaattatcctggtttcctgggagatttggaaacacaggaattcatgtgtttttgagaatgctaggccaagcacctctttgctgctccagacagttggcagatgagtgtagcgtttggggcatggctggggcaactaaacttcaggaactcctagtgaggtcgctggccccaccagcctaggtcaaggggtttttggtcgaggtcatgcttgttgtcgtctgtaagcttcgctgtgtaggtgtgtgggggtgtgtttcagtgctcgggttttggtccttaaccggacttgttgtgctctcttttctctcttaatgaaatgacacacagctctcctgcgtcgttcgagaaaaaaacacatatgtatttggcaattccacactttgaaatcagttcacaccaattgtcggactttaggtaacttattatagagtacggattaccgagtcagctcatacgtgtttgaatgagctaccatttaacttgtatgattgtctagtttgatcctacaacttgtattggttgttttaatttcttcattcccatttgttctcgtgacaggtttttgttggtatatacaagtttatagcctaccttttgtgttgtataggtactg

SEQ ID NO: 691 - DNA, 1192 bp, Setaria italica
  source 1..1192: mol_type = genomic DNA
acgctggtgagttccttcgcgcttccacctctgggttttgttcctgctgtttcagaagtggctctgtggttcatcgcgcatcggactgcctgtgcggatcctatggtggccgcggctgttgggctgatggggttttgatgcttgaggattcatgccatgtagttagcttgatgtacgcgggtcacttgggtgtggaaactgtagatgcgaacggggtgtggtaggctgcctagatcctcgactctgctttcggtcaggcgtgtcttcagtgaaacatcaccgatcccctggttcgtttcaacttcaacagcacaaaaaacttcggccttcagaaagtgcagcgataggtcatttgtccgcttcgcttctttacaaccgggggttaggggggtgatgccttagtgctaatgatgtgattcagagtcgctgacctactagtagaatggttgggtgtgcatttgtatagggcctttgacctttgatccagggtgatcatgatattttggtaggggtgtataaccgttttatgtgcaactcaagtagaataatgtatttgaaccattggattcaattaggagctaatatctggtcatcccaacccaagtcattttaagctttctggtccttagttgtaattgagttgtaagttttgaggaaattgttgcacacatagcagtctcttttgggtgaccttgaaaggaaaataagggtgttttagagtgtttatcatgatgcagctcagctacagtgcgtaggaggaattgaagttgagaggtgaagcatgaattgtggtttattttgataatttcgcagttaggcaattcaaaacaagtactgtttgctattctagtcccacctgcacattcctttacctagttgtatttctaaaccatcttgattggcttaatttgcatgataaatgctcctatgtcttgttgggaaacagagatttcactgaccatttccgagtataaacacacaatctgggcaattggtgtctttgcttgtgtatttttccctactatagtgaaacacatctgtcaagtggataatgtttatgttctggttcttcacttagataatggtctagatgtcattacttggcttgcatgtgtaccattaaattaacattcacagaggacttccaatttttaactctatgtctaatataattttcgttgcataggtattg

SEQ ID NO: 692 - DNA, 906 bp, Setaria italica
  source 1..906: mol_type = genomic DNA
gcgctcgtgagttccttctcccttcctcctccgtgttttgttcctgctgcttcggtctgctttgtagttcatcacgcatcgcgagtgcctgtggggatctgtgggggcgtatacatagtttggttgggcgatgcacggtgctagtggtgccattcatgttgcttgttactagtagaacggctggctgtgcatttgtaaaaggtgtgatcatggtaattttggcgagggaatttcttcgtggacaaccatttgcgcacatctaagtcaatcatgtatttgagctgttggattcgtttaagagaatattattccaacccaagtgattttaaggctccgatccatagttctatttgggttgtaagttgtaagaaacttgctgtacttgtagcagcgctcttttggtcggtgaaggaaaagcagggtgttttagggtggttattatcatgatgcagcgcagctggcgataagtatagatgaggaattgaagttgggtgatgaagcatgaccatgttgatgtttatttgataatttagccattgtatgggaactcatatctagtactgtttgctattgtagttctctccctgcacatgcctttacttagttgcattgctaaaaccgtatttctttgcttaatctgtatgaaaaaggctcctctatcttgttgggaaacagagatttcattgaatgcttgagactacaaacactcgatctggacacttgtgtgtttgcttatgtatttgtccctactagtgaaacacgtgttttgtggtttatgtatatgttctgtttctttcacttagataagggtctagatgtcattgcttgtctttgtactgtttgattaccatccaaagtatcaacttgtaacacaatatgtctgtattttttgttccataggtattg

SEQ ID NO: 693 - DNA, 906 bp, Setaria italica
  source 1..906: mol_type = genomic DNA
acgctcgtgagttccttctcccttcctcctccgtgttttgttcctgctgcttcggtctgctttgtagttcatcacgcatcgcgagtgcctgtggggatctgtgggggcgtatacatagtttggttgggcgatgcacggtgctagtggtgccattcatgttgcttgttactagtagaacggctggctgtgcatttgtaaaaggtgtgatcatggtaattttggcgagggaatttcttcgtggacaaccatttgcgcacatctaagtcaatcatgtatttgagctgttggattcgtttaagagaatattattccaacccaagtgattttaaggctccgatccatagttctatttgggttgtaagttgtaagaaacttgctgtacttgtagcagcgctcttttggtcggtgaaggaaaagcagggtgttttagggtggttattatcatgatgcagcgcagctggcgataagtatagatgaggaattgaagttgggtgatgaagcatgaccatgttgatgtttatttgataatttagccattgtatgggaactcatatctagtactgtttgctattgtagttctctccctgcacatgcctttacttagttgcattgctaaaaccgtatttctttgcttaatctgtatgaaaaaggctcctctatcttgttgggaaacagagatttcattgaatgcttgagactacaaacactcgatctggacacttgtgtgtttgcttatgtatttgtccctactagtgaaacacgtgttttgtggtttatgtatatgttctgtttctttcacttagataagggtctagatgtcattgcttgtctttgtactgtttgattaccatccaaagtatcaacttgtaacacaatatgtctgtattttttgttccataggtattc

SEQ ID NO: 694 - DNA, 998 bp, Setaria italica
  unsure 296..308: note = unsure at all n locations
  source 1..998: mol_type = genomic DNA
gcgcttgtaagtgtttctacgtttgagccttttttgtgcactacctggtatctttgggtgcttagatttgatgtgctagatgcgtttaattagctaacttggattagcgaggttgttagcttgtagtttggacttggtgtggtgtggcaagttattttcttgtaaattaattacgttcatgggcttctgtgggctgtagaagctacagcaaggattttttttttatctgtctcgagttcagataaaaattgggcgcaaaattatcccactttgcatgcttcccttctcgcagaagnnnnnnnnnnnnntggttttttttggggggaggaaaggccattgcggttcagtacttaaggagataaggaaaagggctaaactcgcttaattattctgggtttctggggaggattggaaacacaggaattcattgtgtttttgagaattgctaggccaagcacctctttgctgctccagacagttggcagatgagtgtagcgtttggggcatggctggggcaactaaacttcaggaactcctagtgaggtcgctggccccaccagcctaggtcaaggggtttttggtcgaggtcatgcttgttgtcgtctgtaagcttcgctgtgtaggtgtgtgggggtgtgtttcagtgctcgggttttggtccttaaccggacttgttgtgctctcttttctctcttaatgaaatgacacacagctctcctgcgtcgttcgagaaaaaaacacatatgtatttggcaattccacactttgaaatcagttcacaccaattgtcggactttaggtaacttattatagagtacggattaccgagtcagctcatacgtgtttgaatgagctaccatttaacttgtatgattgtctagtttgatcctacaacttgtattggttgttttaatttcttcattcccatttgttctcgtgacaggtttttgttggtatatacaagtttatagcctaccttttgtgttgtataggtactg

SEQ ID NO: 695 - DNA, 3284 bp, Setaria italica; identical to SEQ ID NO: 690
  source 1..3284: mol_type = genomic DNA

SEQ ID NO: 696 - DNA, 1190 bp, Setaria italica; identical to SEQ ID NO: 689
  source 1..1190: mol_type = genomic DNA

SEQ ID NO: 697 - DNA, 906 bp, Setaria italica; identical to SEQ ID NO: 692
  source 1..906: mol_type = genomic DNA

SEQ ID NO: 698 - DNA, 1238 bp, Setaria italica
  source 1..1238: mol_type = genomic DNA
acccaggtgactgacctcatcctctttcccccaccctccgtctctggttgctatagctaagttcatccatgcgatgtcctgctagctgattagtatttctactagtggagttcgagtcgttttggttccattcagtagtgcttgtgttgattggattgaatcggaggactcgaagtggtttgctgctcgaatcgcaagtttgttgggctaatctcgatgcaatttatgtcaattcgttgttttagtggtccttggcagttctctctgtgacaggtccgtccgatctgtagagatgcggtggaatcctggtttactcaaaacggttctagattcctctgttgttcccttaatttttgtttacgttaggagcctatgaagtggatatgctcggatccttttctgaaactcatctgtttactcagatctgctggcagctcacagttccagggtagttacgttgatggtctagttttggtagtttcatgttctatttctgtccatttttgtgatgttcagtatgttaaaatactatctgtgcttctgaatatcttgttatatgaattcattgggacaaactatgcattccttttggcatcttaaatattttcctgaaggttagaatcgacttcgaaatgtttgtctaaattaatcttctggtgtttccctatgccagtctgttaatatgtctgtattatagtgttttgtttgaagtggtaatgtacatggtgcaccctgcagtttttcatgtctaatattggatctccttgtttgctgtatgtattaaggattagtttcacttctaatagcttactgctgatgctttcttgtttgtgtaatatgctgtgtaatcatgttgaccctgaggtttgtaagaattcctcttatttgattattgcatggattagtgtcctgaaggatgtggctcctttgtacaattaagataattcacttttttttttctcaacttttatatgcttactagcccattaggttgtgtaaacattagagtgctttagcctggtaaagatgagttaagcattttaaataaatttttggatttggttgatatcatccttaacacctgcatttaaacaatttgtctcttttgatcctgactattacagtgggtgttactttctttagtcattctgtggtatcaaagtttctggtgtagttgtgtaattatggttttggttggattcttactagtattttctacctttaaacagcaggaaatt

SEQ ID NO: 699 - DNA, 1237 bp, Setaria italica
  source 1..1237: mol_type = genomic DNA
acccaggtgactgacctcatcctctttcccccaccctccgtctctggttgctatagctaagttcatccatgcgatgtcctgctagctgattagtatttctactagtggagttcgagtcgttttggttccattcagtagtgcttgtgttgattggattgaatcggaggactcgaagtggtttgctgctcgaatcgcaagtttgttgggctaatctcgatgcaatttatgtcaattcgttgttttagtggtccttggcagttctctctgtgacaggtccgtccgatctgtagagatgcggtggaatcctggtttactcaaaacggttctagattcctctgttgttcccttaatttttgtttacgttaggagcctatgaagtggatatgctcggatccttttctgaaactcatctgtttactcagatctgctggcagctcacagttccagggtagttacgttgatggtctagttttggtagtttcatgttctatttctgtccatttttgtgatgttcagtatgttaaaatactatctgtgcttctgaatatcttgttatatgaattcattggacaaactatgcattccttttggcatcttaaatattttcctgaaggttagaatcgacttcgaaatgtttgtctaaattaatcttctggtgtttccctatgccagtctgttaatatgtctgtattatagtgttttgtttgaagtggtaatgtacatggtgcaccctgcagtttttcatgtctaatattggatctccttgtttgctgtatgtattaaggattagtttcacttctaatagcttactgctgatgctttcttgtttgtgtaatatgctgtgtaatcatgttgaccctgaggtttgtaagaattcctcttatttgattattgcatggattagtgtcctgaaggatgtggctcctttgtacaattaagataattcacttttttttttctcaacttttatatgcttactagcccattaggttgtgtaaacattagagtgctttagcctggtaaagatgagttaagcattttaaataaatttttggatttggttgatatcatccttaacacctgcatttaaacaatttgtctcttttgatcctgactattacagtgggtgttactttctttagtcattctgtggtatcaaagtttctggtgtagttgtgtaattatggttttggttggattcttactagtattttctacctttaaacagcaggaaatt

SEQ ID NO: 700 - DNA, 1237 bp, Setaria italica
  source 1..1237: mol_type = genomic DNA
acccaggtgactgacctcatcctctttcccccaccctccgtctctggttgctatagctaagttcatccatgcgatgtcctgctagctgattagtatttctactagtggagttcgagtcgttttggttccattcagtagtgcttgtgttgattggattgaatcggaggactcgaagtggtttgctgctcgaatcgcaagtttgttgggctaatctcgatgcaatttatgtcaattcgttgttttagtggtccttggcagttctctctgtgacaggtccgtccgatctgtagagatgcggtggaatcctggtttactcaaaacggttctagattcctctgttgttcccttaatttttgtttacgttaggagcctatgaagtggatatgctcggatccttttctgaaactcatctgtttactcagatctgctggcagctcacagttccagggtagttacgttgatggtctagttttggtagtttcatgttctatttctgtccatttttgtgatgttcagtatgttaaaatactatctgtgcttctgaatatcttgttatatgaattcattggacaaactatgcattccttttggcatcttaaatattttcctgaaggttagaatcgacttcgaaatgtttgtctaaattaatcttctggtgtttccctatgccagtctgttaatatgtctgtattatagtgttttgtttgaagtggtaatgtacatggtgcaccctgcagtttttcatgtctaatattggatctccttgtttgctgtatgtattaaggattagtttcacttctaatagcttactgctgatgctttcttgtttgtgtaatatgctgtgtaatcatgttgaccctgaggtttgtaagaattcctcttatttgattattgcatggattagtgtcctgaaggatgtggctcctttgtacaattaagataattcacttttttttttctcaacttttatatgcttactagcccattaggttgtgtaaacattagagtgctttagcctggtaaagatgagttaagcattttaaataaatttttggatttggttgatatcatccttaacacctgcatttaaacaatttgtctcttttgatcctgactattacagtgggtgttactttctttagtcattctgtggtatcaaagtttctggtgtagttgtgtaattatggttttggttggattcttactagtattttctacctttaaacagcaggaagtc

SEQ ID NO: 701 - DNA, 1415 bp, Setaria italica
  source 1..1415: mol_type = genomic DNA
tgcaaggtatatatgcgcttcgatctgggttcgagtactctagtcctgcgattatatctagatgcgcgtggttgtgtggttgaactggctgaagtggtatcctgtcatactatatgatgtcttgatggggataaatgctgttactgttatctctggacggttgacccttgtctctggggatggaatttgtggattggatgctagataactgatgattattcagatggtgggcatcatgtctggggattgaatttgtagatttggatgctagatatttgatgattagtgattgcttagaggaaggtggaaatcatggttgatgagaaacgcgatgcacgtgtgaagggtgccatctggagttagtatgttctgttgaatcttctttgcagagctgcagtttgttatggttaaatttggtttgcttcagtgggggatggtctgtagattgcacccagttcaaattagtagttgaatccgtagagaaaaatggatgttatttttccccttattaaggggaaatctagtttgacatgtacagtgactaactcttggcaaaagctagccaaatataatgtacatgggaactcattctttacacttggttgtcagcaggtctgtaccctcaacagcaattgaggcagtttgccctcaccaataagtttgattttgatcatctatacagtaatctagacaaacgggaagttacttcatgcacagcctgtttgtttaagtccattacaaagagtagcttttggcccatttgtcacccgagtgataaccacgccttgtcctaaacaactatgcttgctcagaatatgcttaacatttttggtagtcaatcttgggcatagtggtaaacatgactttattagggagtttattcatgaagttgaaaaggttagcttggaacaaaaggtaacttgcattcattcctacttctcattggacagggggtggaatttgcctccacattggatatatgacattgcactttgtgattaaaatgttgccatgagtaggatggagatcttatacttacattttataattttctttgggagatctatacctgggttagaatggacaaattgcttcgtacagatatactgatccatttggtgacaagtctaaagctgccaaagcttttcccagtctagttagcttgttgtacactattttagtggttcactgcattcttataaggtgatgataaaatccatgtccttctatgttccctactgtctttttttatattatcgagtctttgatgggttcagtgatatcagcaatgcaatgatgaagttgtccaaaactatttggcatttcccatgctcttaagtagcatcatagttttgtcgggattttgtttcatttatcaaacatggttgataaataaagttatgctgcaggtggtg

SEQ ID NO: 702 - DNA, 93 bp, Setaria italica
  source 1..93: mol_type = genomic DNA
tgtgatgtaagttaaaatatctccgcctgtttaactacctttctatgatttacttcataattgactcactgtttcaactcctcttaggtgcca

SEQ ID NO: 703 - DNA, 97 bp, Setaria italica
  source 1..97: mol_type = genomic DNA
ggatttgtatgttcttccaatcagccgaagtacctctcttttcggttaaatgttagatttgatatttatcagttatctcaattactttcaggtgagc

SEQ ID NO: 704 - DNA, 593 bp, Setaria italica
  source 1..593: mol_type = genomic DNA
ggtcaggtattttgagaaactctccatcgtagttacctatttctacctacctatttctacctcaacgtttttttttctggaaaatagtaaaccattttacaatcattgtgtatgtttcagtcaatcgttatgtatatttcaatctatctcgtaatatatcagtctattttggtagccctcttccatagaatcttgttaatagattttgcatgaaagcagtagaatgtaagaccttatagaacaagaggtggatttcacatactctttatttttcttgcaaggatccaacttggttgccatgtggtattaaaaaatatttaaagtatgcatggcctcaatgtttgccaggctagtatgattgacatgagtttatttataatgttctgtgaccacatcagttcttccatgctcatgtttgactttgtgctgtttctatttgaatgctcctgcgcatatctactgaaaagttgcgtttatttgaatttttgtcattgcactcttgcatgcctgttctgtgattttaacaaatgttgaaatattttatcatgttctaagattgtccaaaaatgcttactccatctaatcagatcaag

SEQ ID NO: 705 - DNA, 115 bp, Setaria italica
  source 1..115: mol_type = genomic DNA
tcctcggtgagcggccgcccccgctctctctctctctctctctctctctccccccccccccccccccccctctctctttctaaattctaacaccgtcgatccaatccggcgagct

SEQ ID NO: 706 - DNA, 910 bp, Setaria italica
  source 1..910: mol_type = genomic DNA
tggcaggttcttcggtcgggcttgggagatgtcggacgaggagcaccatttcgagtcgaaggccgacgccggcgcctccaagacctacccgcagcaggccggcaccattcgcaagaacggctacatcgtcatcaagggccgcccctgcaaggtacagatccctgtttcccgcctcagcctatttcgttagattcagtggattttggcgatgtccccttacgagcggtgtgctgagctgtctagcctttagtagaccgtaacgcgagaagttgctggtcgaatacctttttgtgctggttagtctgtggcatgtgctgttgtggtggatatctggtcaatcgtacctattgtgtgtgcttatgcattttcgtgccttttaattgtggcgatagcaggtcctgtggcggttcatagattgcttcctgacccttagttacgcagtactgtgattacataaattattcattctctgaaatgccagcttctactgtgatgttcttttgtccctgctctgcattgaagatcttttagtacactattctaatatctagtaccaactgcttgcatttgtgtgaagttcctgtatatcatattattatgtcgagtttatattccattgtatattggttgcgaaatgtgtaattgccatctaactcctatggtttctttcactgtactttgtttcactttattattgatgtaattcacgtgctaatttaggtgttgactggtcttgttgtggaagtctcttaattatgaatcaaagttattgctttaaatcccatttgcattccttcaatggccctggaaatgccattctttagattttgtggcatcttgatggcttgattgttgcagccaaatgatggtgtttactgtcttactctttccctcttcattgcaggttgtt

SEQ ID NO: 707 - DNA, 765 bp, Setaria italica
  source 1..765: mol_type = genomic DNA
tgcaaggtacagatccctgtttcccgcctcagcctatttcgttagattcagtggattttggcgatgtccccttacgagcggtgtgctgagctgtctagcctttagtagaccgtaacgcgagaagttgctggtcgaatacctttttgtgctggttagtctgtggcatgtgctgttgtggtggatatctggtcaatcgtacctattgtgtgtgcttatgcattttcgtgccttttaattgtggcgatagcaggtcctgtggcggttcatagattgcttcctgacccttagttacgcagtactgtgattacataaattattcattctctgaaatgccagcttctactgtgatgttcttttgtccctgctctgcattgaagatcttttagtacactattctaatatctagtaccaactgcttgcatttgtgtgaagttcctgtatatcatattattatgtcgagtttatattccattgtatattggttgcgaaatgtgtaattgccatctaactcctatggtttctttcactgtactttgtttcactttattattgatgtaattcacgtgctaatttaggtgttgactggtcttgttgtggaagtctcttaattatgaatcaaagttattgctttaaatcccatttgcattccttcaatggccctggaaatgccattctttagattttgtggcatcttgatggcttgattgttgcagccaaatgatggtgtttactgtcttactctttccctcttcattgcaggttgtt

SEQ ID NO: 708 - DNA, 98 bp, Setaria italica
  source 1..98: mol_type = genomic DNA
tgtgatgtaagtagccagtgtgcaccatgttctgtcttgtttcttccttcctgccatgcaatgtgtttgactgtcttttctttaccctgtaggtgccc

SEQ ID NO: 709 - DNA, 99 bp, Setaria italica
  source 1..99: mol_type = genomic DNA
ggatttgtatgcttcttccaactcttctagtttcctgaaaatctgttcgtaatgattgcttaagtatctgtacatgttcgatccataatgcaggtcagc

SEQ ID NO: 710 - DNA, 102 bp, Setaria italica
  source 1..102: mol_type = genomic DNA
tcccaggttagagctcaatcataatttgtggtctgcttgagctttgtgccaaacaactcttcagatctcttaactccttttctttggtaagcacagatcagg

SEQ ID NO: 711 - DNA, 1014 bp, Setaria italica
  source 1..1014: mol_type = genomic DNA
tgcaaggtacggtaccggtgcatccccctctcgcttgttacgacccataaagaattaatggcaacacaaatctcctattgtttgttgatttagaggtgtcgcggacaaactgctttgatatctattttgttttcccgtactgatttgtgcgctctgaaacttgcggttacttgcggattcagaggcgtcccaagtgtgagacggatccagtagattcacccgcaagacgactttgcagtgtagtagaaagctttgatctttcgatgcgctttgtatagtttcagtcttggtcatgatttgtatctgaattacgtgatctttggggctgcttaggcatctgcggctccccctgttgtggttctggatgtcttcctttgatctgtctagatttttttttttgtttaatgatgaatggttcaaccacaaattaaccctgggctgtcaacaagatacctgtcttgaccgtcaatgaatatgtttcagttacatatttgtaatactgcaaaaaaatccagcaaggttctttggagaaagcggagagttcatatcttttttgcaagaatttaatgctccttgcactgtttattctgcagttctgaacgacatgtttagatctgcaatgctggttaaactaggactatttccctgtaatttgtatggcttctacttgcccagggagttcttttttatcacttttgctcccagcacctccctccgtatagttgctatctgtagccaatgtccttcatgcatgaaatattgtctgaattcattatctgttcctgctggtatgagttgacatgccattcaaatttgtgtcatcagtgtctggattgatacatgttttcatactggaatactggatttcaatatttcttactaccctatgtttgcttgccacaccatattcctttatagtttgtacatccggtggccatattctctctttagatcttgcaatccaacaagtcttgatctgacaataattcctgtatactctttctttaggttgtt

SEQ ID NO: 712 - DNA, 97 bp, Setaria italica
  source 1..97: mol_type = genomic DNA
tgcgacgtaagctatcaagtctcacgttctggttcagttacaagtgcacagaatttgtttgaaccttttgtttcccacttgcatcatacaggttcct

SEQ ID NO: 713 - DNA, 101 bp, Setaria italica
  source 1..101: mol_type = genomic DNA
ggatatgtatgtttgcttccaacctagcctttctttcattcagcaactttggcaatgccttcctgtttataacaagcaaggaggccattttacaggttagc

SEQ ID NO: 714 - DNA, 110 bp, Setaria italica
  source 1..110: mol_type = genomic DNA
gcccaggtcagtgcgctagctcaaacttggtcaatggcacaacagctttagcctctattgcttccgtgccaactctcttactcactttacgtgcaaccttgcagatcaga

SEQ ID NO: 715 - DNA, 1457 bp, Setaria italica
  source 1..1457: mol_type = genomic DNA
agctaggtgagctcttcctacctgctctttccctttctgttccctgttcttgtgtgctcatgcttcatgtggccggtccctgttcttcttcgttgatcttcttctccctgctcctttcgatcaatatctgtttttgctgttggagggtggtgggatggttatctgatagggttatgattggtttctgcgggatctttctctctagatttttttaggagctccttgcggcggccaattcctgtttgagttctgctttgatccttcctctcgttcctgatgttttgtcctggtgcgtaaaaggcgcggctaaatccatggtagaggtccaaggctgctgcctaggatgacgttgcggttcccgtccagaaacctgagtttcgcacatctctgttgaattatttttcttttgagttttgcttggatctcaatacctgttctttgtcaaaggagcttgttctaggaaatgtgtagcagccgggtataatggatacgctttgttcctcgtcaggaaaaagattttttttctgcttattaattttcggaggtgggaaattttatgatttttgtgtttcattttgcttcttgatttcctttttctggatgaccttgattccctttgttaagcacatgggtacatgttcttgttcccaactgtccatacctgcttggctgggtaaaacaaatggattcatgaaaaataatttatcttattttatctgaaaagctttcctcccctgctttttgatcctttctctttcccccttgtgatcaatcagaagcgttacttcattagtacgtttcaacatgctttgtgaaggaaaggggaaaaaagatggaaactttacatgctttcttcctatgaaccgccttatgagaagtagttatttggttgacctatttatgggcatatgttttcatgcttgaattctttgcttatatttctttttcatgctgtgtaatctgttcatttatgtggaaacaataaggatcatcctatctttagtccctgttagtcttagccggatcgatttcagaagaaggattgccggggaagtgtccatgtattgttttgatcagatcaaggctctattctgtttcaccaaacacatgctagattgctaactttggcctcccggttgttgcttcaataggcaagcttgctttttcctgccacatgattgtctcctagctgtgtagatctatgctgccgaagcaagaagccctctgttaagtgatactactaatagcagttacttattgcaaatcgtgtaattaccaaattaagatgccacgataagcttcacccagccatattaattacctttttatactgacgcaatcgtgttgcacatgtttaccttcttggcacataattactgatagtaacacggtgattcacctcttaacaatcagcagttgacgtgttcatcttgcttgctgctcctgtgcaggcgaac

SEQ ID NO: 716 - DNA, 1457 bp, Setaria italica
  source 1..1457: mol_type = genomic DNA
tgctaggtgagctcttcctacctgctctttccctttctgttccctgttcttgtgtgctcatgcttcatgtggccggtccctgttcttcttcgttgatcttcttctccctgctcctttcgatcaatatctgtttttgctgttggagggtggtgggatggttatctgatagggttatgattggtttctgcgggatctttctctctagatttttttaggagctccttgcggcggccaattcctgtttgagttctgctttgatccttcctctcgttcctgatgttttgtcctggtgcgtaaaaggcgcggctaaatccatggtagaggtccaaggctgctgcctaggatgacgttgcggttcccgtccagaaacctgagtttcgcacatctctgttgaattatttttcttttgagttttgcttggatctcaatacctgttctttgtcaaaggagcttgttctaggaaatgtgtagcagccgggtataatggatacgctttgttcctcgtcaggaaaaagattttttttctgcttattaattttcggaggtgggaaattttatgatttttgtgtttcattttgcttcttgatttcctttttctggatgaccttgattccctttgttaagcacatgggtacatgttcttgttcccaactgtccatacctgcttggctgggtaaaacaaatggattcatgaaaaataatttatcttattttatctgaaaagctttcctcccctgctttttgatcctttctctttcccccttgtgatcaatcagaagcgttacttcattagtacgtttcaacatgctttgtgaaggaaaggggaaaaaagatggaaactttacatgctttcttcctatgaaccgccttatgagaagtagttatttggttgacctatttatgggcatatgttttcatgcttgaattctttgcttatatttctttttcatgctgtgtaatctgttcatttatgtggaaacaataaggatcatcctatctttagtccctgttagtcttagccggatcgatttcagaagaaggattgccggggaagtgtccatgtattgttttgatcagatcaaggctctattctgtttcaccaaacacatgctagattgctaactttggcctcccggttgttgcttcaataggcaagcttgctttttcctgccacatgattgtctcctagctgtgtagatctatgctgccgaagcaagaagccctctgttaagtgatactactaatagcagttacttattgcaaatcgtgtaattaccaaattaagatgccacgataagcttcacccagccatattaattacctttttatactgacgcaatcgtgttgcacatgtttaccttcttggcacataattactgatagtaacacggtgattcacctcttaacaatcagcagttgacgtgttcatcttgcttgctgctcctgtgcaggcgaat

SEQ ID NO: 717 - DNA, 153 bp, Setaria italica
  source 1..153: mol_type = genomic DNA
tgctaggtgagcgccgcgcgcgcccgtcctctcccccgcacgcttcgttgcttgcagaattccgtgatcgtttcatcctgtctcgtttcggtgcgtgattttttgtttccgctgacgggtggtttggattggatctgggcggaccaggtgcgt

SEQ ID NO: 718 - DNA, 115 bp, Setaria italica
  source 1..115: mol_type = genomic DNA
ttccaggtgagagcgcgatcccgtcgccggatctccctcgccgcgtggcctggctgtgttcgcgtgctccgaatcctgattgtcggtgccaatttgctgcttgatccaggccaat

SEQ ID NO: 719 - DNA, 669 bp, Setaria italica
  source 1..669: mol_type = genomic DNA
cacgaggtacgtgcgccctggcgagatcccgtagcatgttcattgctcgtaggtctgcgggatcgggcctgcttcatgtgttgggtcaaatccatctgatggagggcgtctagatctcatctgagtgataaggccaggaactgagtcggtctagatctacgtgaaagggacatgagttactgataattgtgccagatctctgggaagcaagctttcaggttacttttgcatcatgtgggggccactgtataaagctttagctcgaagctttactcgagcgttgggtacttattgtggatctgattggtaatgtgagtgatcactgaattgagtgagatcaagcagcaaagtgtgcattaatttatagagctcaagctgcatcatggctctagtccagagtatctgttttgtggatctatttgggattttgaaagatcacaaagatccactgtcaatgctttagagatcctgttagaggtactccattttgagcttcataatagtttccgagtcatgtggagtgctgttcgaaaggatccagggctatttacgttagtgtttttcatgcttcatatttaaagtggagaaaccattgagttctagtatccttgttacagatcctgtctttcggacatttatttgaccctgttctgttgtgtccaggtcatt

SEQ ID NO: 720 - DNA, 764 bp, Setaria italica
  source 1..764: mol_type = genomic DNA
gtcatggtaaaataactagttaactatgcattcctaaagacatttggctgtaaatccgcagtggaccttatgactctgcataagcacaaattcaatatcatgttgacatcgctttaagtcttctctttcagagcatcctgaaagttattgatcttggatagtcaatgacacataaagtgtatgtctttatgttgtctctgtgcttgtccttacatgtcctgtgttgttggttgaatggagcttaatattttctgaatttattattgagccttagttgttgtcttgttgacttgtagtactatactcgcaattagaagttgtagttattttcgtcttcttcagaagtccctgaaaatttgaaaatcatgggtagtcaatgacaattgaagtaccatgcatttattttgtcatatattcaatgcttgtacaattgcatgtcctgacttgtctgttgagtgaattaaatttatttttctcttaattggtcattggctattgatttgtaacttactaatggcaactcatatttggagaagcatgtgcattcaagttgattttctgacactgctcgtgttactttcttcatttctgatcacgaaaaatgtgatgatgggacggatcatatactccaataatagtttcatttcctcttggaaaaacagtttaacaaatcattcgtctcagctgttccgttttaagtgtattttcttcctcatgaattgtgcacttacgctgtaaatttgttctcactgttttagatgtca

SEQ ID NO: 721 - DNA, 533 bp, Setaria italica
  source 1..533: mol_type = genomic DNA
cagcaggtgagatgtcgcaaggaaaagatagatcttttcccccttttcttttcttttttttaaaaaaaatccctggtgaagatactgttgcatctgtggggcactggggctctgccgtgctctctctgagctcgagcccagctgtgattgattgcttgctcatgggtcacggccatggccatggcaccctcctgcaaaagcccctgcctttggggtcttgtcgtgagcaaaagggagcgcatgtccattattcccctcccttttgcttttgcaacccgaggccaggcaggatgtgtcctgtccccaaagatgcaatctttatcctccttgcacatacctcgcctgcaaaaaaaaaaagttaaagtggccactgattggggctgcttccttaaatcttgcatgtgtgggaactagggagccattggtcacgggcaccgtttcctgcagtccctactgtacctgcgtcctgttagctcactgtttcagtgtttgttcttgttgttactgatgatgttcttgtgattaaggtctgg

SEQ ID NO: 722 - DNA, 813 bp, Setaria italica
  source 1..813: mol_type = genomic DNA
cctcaggtaaacatccttctctctcacctgtacttttgtcaatagctcaaggtaggagatttgaaatggttgcttaaaatgcatggaagaagcaagtaaaatggcaatctgattgtggttttcctgttcagtgctctgttttttcattctagatatgaaagattgtcttgctgtatgattctgtcatggtttagttatattttctattgtctttcttgggataagatggtgttttctttggtttgtttcttcaggcgcaacaaggaacttgcaagagaagaatagtgaaccaataacttaaaatgcatggaagtaaaatggtcatcttgttttagttctcctgttagtctatgtctctattatgtattatgtcgtttatatatgaaagattgccttgcattgggattcttgtgaggtcttagttttacgtttcgttatctttcttagatagtgtttccattggtttgtttcttcaggcacaaagaaaaaggttgcaaatataggcaaataatgatctcaatgatttcagttgcttttggaaacgtttcatttctgtgcttcttgactgatgctcatttggtaacattttcctgttaccaatgtgatgccctcatgctacatgattttagatatataaaacacatgctagcattgggattccattacgttgaacaagatgcccaggatatgcgacttcagcattttagatgcaaactagtcacttgggtgatatgaaattctgaatgttgctaaaatttttgggcggtttgtgtcattgtcatatctaatggggattgcattttacaggaggac

SEQ ID NO: 723 - DNA, 451 bp, Setaria italica; identical to SEQ ID NO: 241
  source 1..451: mol_type = genomic DNA

SEQ ID NO: 724 - DNA, 638 bp, Setaria italica
  source 1..638: mol_type = genomic DNA
cttcaggtacgtctccgttccgccgccttgttccgctcgatcctcggtgatgcgctacgcgttggttagattgattttagtcgggggcagagggggattgttggatccttgggtggaggaaagggtatcaccgattatcgctgtttacatgtggatctcgcctcccgccggtagggggaaggggatttcttcgcgtgcgtgctgtttagtgcatatttgttggggatatgttttggcttgtgcgaatcttaggattctcgcgtggaagaacccgatcctctctatgctatgtgatttcacctaggcccgtttggtttaggctcgttcgtgcgccatctgactcccagtttgctggtgccaattttaggattcgatgaattctgtaggttttacattaacctggttgatcctcgccaggaagaaatcagatcctctaaattcctgtgctatgtgatttctatctaggccggtttggtttaggctcattggtgtgttatctgacttctagcttaaatgcgcttaagtatgttaacatcttggaaatgttcgtggcagagattttttattctttgtggtagccgttctacgtcatgctagtctgtgtctacctgacttatctgttcaatgtccaggtttag

SEQ ID NO: 725 - DNA, 487 bp, Setaria italica
  source 1..487: mol_type = genomic DNA
gcgatggtacatgcgcaagtttgatttgtttcattacgaaatttctgtaccactagtcaattgcttgtgatgatcttacgccatgtgctcgcatgatgccttgcgtaaccaatgcaccggatatgtccacgcttatgtgttcgttggatgccaaatcacgtctgccgtttgcactacctttggtcataatcgtgttattaattttgttaactgacgtactttggcatgtccgcatgagtgcacatgggcgttcctgcaatagtgcaatgcagggcatgtaagtttacctgcggggtagtggaatgcagttcttcatcagattggtgcgcgcgtgctgatacacaaattgatatatgttgggataactttattgttgcatgtcagcacgtgaacggaaaactttagtacagatgccatctcagtatggggatctttgtgtggacattggttttgaattggttgagacttggaattatgacaggtactt

SEQ ID NO: 726 - DNA, 351 bp, Setaria italica
  source 1..351: mol_type = genomic DNA
gttcctgtaagtactgctgctgcttgatttccctagtttgttcaattgttggagttcttcatcaattaatttagcttatcacatatatgttatttagtcgacatttgcaactaaaatcttatatgacagtgttgtaatttgtgttctgaatttctgatgttcaacttaattaatatacctcatacagtatgcatgtaagtatttattgtctttgacattaagaagccgcatgtaatgaacttatgcactctaggtcctatgaattgaaaatatatgcattcttttcattacatattttcatgtttgtgctaatgcttaccatgaatccttatttggtgaaaacagatcctt

SEQ ID NO: 727 - DNA, 516 bp, Setaria italica
  source 1..516: mol_type = genomic DNA
caccatgtgagtggaaccccctcttcagtcctcttctcacccactttccatttccagtggttttgttacctactcgcactgaaatgtctccatccaaaatatcagacatgcaaccaccgtctttccattgtgcaacaaatatagtggcatgttctggaaagtctgttctaattctaactaggttctgtatttattctcacctcacctatgtgaaatattttttgtgaccaaactaccggtaatcattcactcaccaaactactaaaatgatgcagacagagtgtggcatgccattgacaggcatgacctataactacattgctctggcctctgaggctctgtgttaatcttatcacaaaggcttgtctcaatccatgtagttggcatgtattaatctaggctgtgtttgggatatgatatcattctggtcctttgctaacgtacatttaatcgcctatcgatgccgaagagttggtataaccttgttcctgttcctatcattgtttgcagtggatc

SEQ ID NO: 728 - DNA, 1339 bp, Setaria italica; identical to SEQ ID NO: 253
  source 1..1339: mol_type = genomic DNA

SEQ ID NO: 729 - DNA, 95 bp, Setaria italica
  source 1..95: mol_type = genomic DNA
tcaaccgtgagtatccctaagcggcctaccatgatttcttccttcccgatcctctctttgtcactgatgttcttctcctgctcctgcagaggtca

SEQ ID NO: 730 - DNA, 99 bp, Setaria italica; identical to SEQ ID NO: 244
  source 1..99: mol_type = genomic DNA

SEQ ID NO: 731 - DNA, 1533 bp, Setaria italica; identical to SEQ ID NO: 245
  source 1..1533: mol_type = genomic DNA

SEQ ID NO: 732 - DNA, 180 bp, Setaria italica
  source 1..180: mol_type = genomic DNA
caacatgtaagctatttcctccttgtcctttgaggttcttggttttttcgtcaataactgtttagtactgcatgcacttgttttgagatttattagctagcatgtaccaaactgaagctgaactttgagcgtttgccccattcttgatcactcgacctcttgcgatgtatgcagaagcgt

SEQ ID NO: 733 - DNA, 95 bp, Setaria italica; identical to SEQ ID NO: 729
  source 1..95: mol_type = genomic DNA

SEQ ID NO: 734 - DNA, 180 bp, Setaria italica; identical to SEQ ID NO: 732
  source 1..180: mol_type = genomic DNA

SEQ ID NO: 735 - DNA, 795 bp, Setaria italica
  source 1..795: mol_type = genomic DNA
cgcggaggtgagacagcaacccactgccaccccccccctccccccctccttctccctgaggttggatcccggccgcgcccatctcgcgtcgctgcaggtcggatctattcctgatttggtctgtttgttcattctctcgtcctggggctggcgtgtgtagatctaggtgtttctgctgtgcctgcatgcagcggggagttgtcgtcccgatatgttcgactcggccagatggctgccaccgcgatggcatgttctgaggagaacctgctcgatttcgcccatctgtgtccaattccggatagagatggtgtgcccgatagcttgcttgttggttagctgaatatgatttgaagggctgtttaatctagatttctagctccaaatttgagtgataggaatataatttaagtcttattttcaatggcgacaagtcatgggaaggattttgttcgcttctggaatccgtccatagacgtgatttttatttttattggggcaaatttcacgtttgacatctccatgaacatttttctgtatgtggatggaatgctagttgaggtccacgtagagtgagtgtgtcctcggttgtgctagtgatggttgggagattgaatttcaatgtgccatcccgtagccaaatgataccgggttcaatttcttgtgactgcttttgttctgttctagacctattgctgtagctggaacatctgattcttctagttactgctctgtctattatctgctatatcatctgcgtatatataaatctaacagaactttgtttctgcagtcagg

SEQ ID NO: 736 - DNA, 1161 bp, Setaria italica
  source 1..1161: mol_type = genomic DNA
cgcttcgtaagtccacctttgaatttttgtttatccatgaccttttctagctgtatgcttgattgaaacgagagcgccgattgaggaactggtgtgggtaatatgtggggaattaatctgagatttgtatcggtcgcctcttgatggttgtgtagactgcttagaaaagaaaattgtcatggtctcccgtgttaatttcttctattttcgcctgctttatctgatctgggccctatatgataaagataaaagggttttttttttttttgtagaggaggctcttgaggtatggggaaagggcgatacatgagggatttgagatcccttgatcgggaatctttgttcttcggctcgggttgctttgctctatgttcttgaaattcatcaaggggcaacgaaataagtggttttacttatttttttgtttgattaggagatttgggatttgggatcttcgatttgatctctttgatcgaactgaaccattagcgctcgattccctcatcattcatttgtttagtagaccttgtgctgcgtttattgaagttttcatccatcctttgattgaactgaaccattagtactcgatcccctcatcattcatttgtttagtagaccttgtgctgcgtttattaaagttttcatccatcattttgattgcctctactaggtttcaagctcttttactagatgttgctaaggtctgagttttgggtgcatactattctggccacagatctgttggtgcgttcagattagattgttgacttgtcttttagtgaagatctcgagaagtagaacagtattcggtaaaaatattgggcttcctgaaatactaagacatgatgagcgaagtagtggtctgattctgactagtaagcctggctagctggtgaacctatcgttttaacctcccagttgattcctgaaataagtttcctgcatgttccctgtttctggtatgttatacatctgaaataaagaggtaggacagtatatcttttacaactagaaataggtgctgttcttttttcttttgaacaagaaaggccatttctgctggtgactagtcatagcttccttccagctttggttatgagtatgtctcatatttatctttctgcaacctataatctctgaatctctccgttgcagggttcc

SEQ ID NO: 737 - DNA, 1161 bp, Setaria italica
  source 1..1161: mol_type = genomic DNA
tgcttcgtaagtccacctttgaatttttgtttatccatgaccttttctagctgtatgcttgattgaaacgagagcgccgattgaggaactggtgtgggtaatatgtggggaattaatctgagatttgtatcggtcgcctcttgatggttgtgtagactgcttagaaaagaaaattgtcatggtctcccgtgttaatttcttctattttcgcctgctttatctgatctgggccctatatgataaagataaaagggttttttttttttttgtagaggaggctcttgaggtatggggaaagggcgatacatgagggatttgagatcccttgatcgggaatctttgttcttcggctcgggttgctttgctctatgttcttgaaattcatcaaggggcaacgaaataagtggttttacttatttttttgtttgattaggagatttgggatttgggatcttcgatttgatctctttgatcgaactgaaccattagcgctcgattccctcatcattcatttgtttagtagaccttgtgctgcgtttattgaagttttcatccatcctttgattgaactgaaccattagtactcgatcccctcatcattcatttgtttagtagaccttgtgctgcgtttattaaagttttcatccatcattttgattgcctctactaggtttcaagctcttttactagatgttgctaaggtctgagttttgggtgcatactattctggccacagatctgttggtgcgttcagattagattgttgacttgtcttttagtgaagatctcgagaagtagaacagtattcggtaaaaatattgggcttcctgaaatactaagacatgatgagcgaagtagtggtctgattctgactagtaagcctggctagctggtgaacctatcgttttaacctcccagttgattcctgaaataagtttcctgcatgttccctgtttctggtatgttatacatctgaaataaagaggtaggacagtatatcttttacaactagaaataggtgctgttcttttttcttttgaacaagaaaggccatttctgctggtgactagtcatagcttccttccagctttggttatgagtatgtctcatatttatctttctgcaacctataatctctgaatctctccgttgcagggttca

SEQ ID NO: 738 - DNA, 156 bp, Setaria italica
  source 1..156: mol_type = genomic DNA
gtacgcccagttccgcgcctatacccccttaccgtttccgccaacacccggtgcctcgcgcgcctcggcgttttcggccgcgcaattgcggtttaggccctgtccagctgagctgycatggtgagcttgtttgcgtgtttttttttgtctccgcag

SEQ ID NO: 739 - DNA, 156 bp, Setaria italica
  source 1..156: mol_type = genomic DNA
gtacgcccagttccgcgcctatacccccttaccgtttccgccaacacccggtgcctcgcgcgcctcggcgttttcggccgcgcaattgcggtttaggccctgtccagctgagctgccatggtgagcttgtttgcgtgtttttttttgtctccgcag

SEQ ID NO: 740 - DNA, 100 bp, Setaria italica
  source 1..100: mol_type = genomic DNA
tccacggtgagtcttccccgccggtcgtgttgctgcgccccggatccgtcgccgtcgggctccgagcacgggtttgatcctcgcggcgttgcagggagtg

SEQ ID NO: 741 - DNA, 1323 bp, Setaria italica
  source 1..1323: mol_type = genomic DNA
cacctggtgagtatgctgacgcggcccacatctccatcacgcactgttaactaaaagcttgatttgcatttaagccaagatgctgggccgtggaggattgagtggatgggatggggttctgcgtgatcacagtgccgagatttgactctggctctagtcaatttgggatttaaatcacggttgtgacgcaaaagtgctgtgcttacgtttatggcagtataggtgggattaatttggcggctctgcgtaggtatgggtgtgctatgatcttgcggcgaaggcggcccagttttagtttgagatctgtagtttatgttggcccgcagcgctgcatgcctgcaactctgatcgactgcccttgctgtagttcatttactgttaaaacggttgttactgttgcagttaaatgccatgaacgagcatgcaaacagtgctgagtaatattggcattatttctttagtgttgttttctgagcttgtgcttggccactatccgggatataatctagctagcagttctactacccagtatgcctttatatttaaggaaaatgatcagcatggttcaacacggattctagtgccaccatttcgatttctcaataaatctgcatttaagaatttaacatcatggatatgaagtgttgacctctctagattgtttaagtggattgtttattccttgtcaaatacatggggtgttattcatcgctgttgctttcagctaatgcaagttcatttttctattgtagattgttgaatgttggtttagaaccaaaatgtgccttttgtgttctagttagttggaacctaacccatttacacaatctatgagctgtttctgattcgcacaagcagggttatcgttaattgtttctttcaattttttcgtctgctgcaaacatcattccattcattgagatgcgaggggggggggacaacatttcgtttatcagacagaatgatagtatatttggcacccgatactagatgcgcaacaagatatttaccagtgatcttgtatcctttgcagtttgaactattattataatttccagcagaatgcattgattttaggaacacaaaaacttaaacaattacagtttaggttaaggaattgtttttcttttaactaattcccatagttgcttatttgaacttgattgaaattagcatgctgccatgccctcattaaacaatctttgtgattgtgatgtttcttatgattagtaacatggcagcaagcatttatgtttagcaagaagcatgatttgtgccttttctttttctgatgtaatttgctgctgttatttccagggtcgt

SEQ ID NO: 742 - DNA, 100 bp, Setaria italica; identical to SEQ ID NO: 740
  source 1..100: mol_type = genomic DNA

SEQ ID NO: 743 - DNA, 1323 bp, Setaria italica; identical to SEQ ID NO: 741
  source 1..1323: mol_type = genomic DNA

SEQ ID NO: 744 - DNA, 110 bp, Setaria italica
  source 1..110: mol_type = genomic DNA
ttcctggtatgtctctccttcctcccgatcactataattcagttgatgcctgatatcgcgcggcaatcgtttccgtgacatgtgtggaatcggatttggcgcagggttta

SEQ ID NO: 745 - DNA, 351 bp, Setaria italica; identical to SEQ ID NO: 726
  source 1..351: mol_type = genomic DNA

SEQ ID NO: 746 - DNA, 350 bp, Setaria italica
  source 1..350: mol_type = genomic DNA
gttcctgtagtactgctgctgcttgatttccctagtttgttcaattgttggagttcttcatcaattaatttagcttatcacatatatgttatttagtcgacatttgcaactaaaatcttatatgacagtgttgtaatttgtgttctgaatttctgatgttcaacttaattaatatacctcatacagtatgcatgtaagtatttattgtctttgacattaagaagccgcatgtaatgaacttatgcactctaggtcctatgaattgaaaatatatgcattcttttcattacatattttcatgtttgtgctaatgcttaccatgaatccttatttggtgaaaacagatcctt

SEQ ID NO: 747 - DNA, 508 bp, Setaria italica
  source 1..508: mol_type = genomic DNA
tgagtggaaccccctcttcagtcctcttctcacccactttccatttccagtggttttgttacctactcgcactgaaatgtctccatccaaaatatcagacatgcaaccaccgtctttccattgtgcaacaatatagtggcatgttctggaaagtctgttctaattctaactaggttctgtatttattctcacctcacctatgtgaaatattttttgtgaccaaactaccggtaatcattcactcaccaaactactaaaatgatgcagacagagtgtggcatgccattgacaggcatgacctataactacattgctctggcctctgaggctctgtgttaatcttatcacaaaggcttgtctcaatccatgtagttggcatgtattaatctaggctgtgtttgggatatgatatcattctggtcctttgctaacgtacatttaatcgcctatcgatgccgaagagttggtataaccttgttcctgttcctatcattgtttgcagtggatc

SEQ ID NO: 748 - DNA, 516 bp, Setaria italica; identical to SEQ ID NO: 727
  source 1..516: mol_type = genomic DNA

SEQ ID NO: 749 - DNA, 105 bp, Setaria italica
  source 1..105: mol_type = genomic DNA
gaccacgtgagttgctgatttcatttctcattatcgatctactacatatgtatagtagcatactatatcgctagcgactaactaagaccatgcatgcagtggatc

SEQ ID NO: 750 - DNA, 1339 bp, Setaria italica
  source 1..1339: mol_type = genomic DNA
gtcccggtgagtacgcacacttatttctcgttgcactcaaagataaattcacagtactgtaccacgcacagtagagtaatcagtgaactgttactgttggttggttactgctagtgcacgcagtaaagggtagtcgatgactaaagactgcagtatactgtagtgtttatgcatacggcccaaggcagaaatataatggatgttagatcatgtaggttacgaagtgttgatgaaggactttgagctgacgtactactagttctttggacttagctcaccaaattattagaacttatgtagcaaactgaatacaaattatttagtatcggagaaaaaactatgcaagtgtaggtccagtgggcgggtcctcttgactttggtgctagagtgcagactgcagaggctaacggtgaaaattagagcgcaaatcatttcagcgcgaggtgtttacagcaacacaaaacctttatgccgtaactcgtaagcgagttgggtagagcagtaaatgaagcgtgtaacataaaagcaacatcctaacaaattaagcccattttttgaacatctagttaaattctgaaattttactgctgctgcctgcttcagcaactatacttttgggaaactgcaccatactagttaccagttcatacagaacatagcaacgaccatatagcaattaaggcaaaaaagctctcaagagactgacaggttaagcattttcaggtcacataatgcacaattagtcatgccatacaagatacgcaatatatcgaatggtcccaaatcctagctgtgcagacctctccaaatcaggcgcatgtgaagatgcatcttcctgcccgatgattgcatgaatttgcactgcatatgccaattaagcagagaggaagattctcttgtgcgtaggcagcagtgtcttcagttgtcgtccctgtcctaatcgctgtcccctacagcgaacttgaggtggctacgtctgccatgattggcacttcttcttgaggataaaatttatcatggataggaacaaggtgcaaaattccaagaggaaattgtggtggggcgatagcctattttgccttcagatttggtaacccatccctttctaggaccacgattttaaaaccctaagctatgttctggggaaaaatataaaaatgtggaactacttgttttgtcagtagctgttctgttgatgtagcggctgaaaagctagaaagactagtactagaatactatttcattttcattatagtatgaaattaaagttactctggggtaactgatcggggagctaaaatataaccgggattttcctttcaccctgtgccaggtgtgg

SEQ ID NO: 751 - DNA, 544 bp, Setaria italica
  source 1..544: mol_type = genomic DNA
gaccaagtacgtacgcttaccggtgcttgttcagtagcgtcgacaattaaaaaagtcgccgcgacatgcatatgcctggctactttctcatgctcaattgctagttgacaaaacatgaattctctaatgcaaactaaccagcggctcaggataggcctaaagactatttgttaatctatcaccatcaccacacaccattgcatcatttagtacagctgtttagcttatgcatgacatgtacactcattaaccaaaaatatacaacctaatcccttgccacaccctcctaccttacagacacctaaaagatgcccagtatttgtttggaactactaactaacctgttgtcgtacaccttggcttggtcaagcatttaactacgcttcccacaagccataatcaaacaaatctcttgaggataagcaagtaaaagaagtgcttaggatatcttacattatgcaccatggaaagcatcagcggtacggtgtagtttaattagctccaccactcactactgccgatcgtattgtttgtgcagtggatc

SEQ ID NO: 752 - DNA, 674 bp, Setaria italica
  source 1..674: mol_type = genomic DNA
gtcccagtaagtagctctgcactgcggcctctcacctatccagctcgatcatgtttgtggcgcgcagtagtgggataacgatgcttagtttcagatatgaatttgcttctttatttgctgcaaggaaacgagctggtaggaatattcgttcgatcactagacactagtgggggtagtttttcgtgagatggtccctagcattagcacactacgagtagagcagttgtgaggtggcaattcgcaagcgattagcatttgatatgcattctttttctggacaggacatactatagaggtaccaaagaccaatggaagttttcagtgatatgataggtttactgtttgtctccgtttagatatggtgaaccatcgctttaaaggagcagcatgtgaaaaatatatatacagttcattgtcttcttgtaggatgggtttgaacaaactaataacatgtatacacgcttaatttagaatttcaaaaatgtttggaacgtaacagcagtacggaaagaaaattttttttggtcttggcgtactgtatcatgcatggaaataaacataatgctgaattgaaacttggtccgttaactgacggaatttcagaacttttagaaaaaatatacacagtcgtcatataacgttccaaactgtcctgctttgttcatcaggtgctt

SEQ ID NO: 753 - DNA, 625 bp, Setaria italica
  source 1..625: mol_type = genomic DNA
gaccacgtacgtcctactacactacacctcgtccttctcctgctaattaacaacctaaagcgctaatggcttcgtgtcaaagaaattaagaagtgctaatggcttacagcatggccggtcactatcactaacaggcccaagcttaactaatcaaacaaaattattgcgatgcttctcagccgtaagttcactagtagcagatagaacccaacagattattttaacattaaaatgtatacgaaaggctcaggaaagtcaggataaggctcaatgatcacttagttaaactgatcagcagatgtcaccccaattgattggtatgcagttttcttagtacgatagcctatgtactactcacagagctacaatgacattttcagccacaagattaaaaacccattaagtcaaaacacgcagtctaatctgttcccaacaaccctccgacctaactgaaaaaactttagcctatgtacctaatactagcttgttccatcttactgttgcatatcatttggaatatatgaaatcgcaaccacctgtaaaagtgtgatgaacataatcaattggagttggagtgtcttgcatcgatcgcttacgctgcctgtatatgtggttgcagtggatc

SEQ ID NO: 754 - DNA, 894 bp, Setaria italica
  source 1..894: mol_type = genomic DNA
cctctggtgcgtaccgccccttccttccttcccccacttctttagtcgctcaggttcctcccagcgatttcctgccaagaacccccggggggccggtgccggttcttgaatacaattggcgcggtggtttgctattacattctgtagttcgccgtggggagacgaggctagccctggctaatttaagctgctcgccagtgtgtgtgcatacagccggcgggtaggtagtcatggggaaagtgcagagccagccagagcggtctccaattcgcggctgcctgcgcgttattcggctggtggtggatggtatgcrcagagggtgcgcgtgaattgaatttcacagtgtcaaaatgtgatcttggacggggttcgcgttattcggctggtggtggatggtacgcgcagagggtgcgcgcgaattgaatttcacagtgtgaaaatgtgatcttggacggggttttcccttgatgggctaccttccttttgcctgcgtgawgaatggggaattgacttttcttgctcgtccatcaatcatgcatgagctaaattatctggagtttggtgaccatgtgatttgcgaaggtcttgcatccaggttgccatttaacatgcttagggaattctacttcatttcttgttcctttttttgtttatatgtatttgtatgtgcctgtgaaagtcatttcttgcttgctattcagtgttcacagtgaactgtcagtttcatgttatgtctacttccgaataaaaggaaaacagttatttttcatgtaatttctgtataatcaataaattagcatgcaattgaatgtcttacattttgctttttcctgtgagaatgttcccccccttgtttaactctgtctggaacatgtttgactatttcagcaaagc

SEQ ID NO: 755 - DNA, 122 bp, Setaria italica
  source 1..122: mol_type = genomic DNA
ctcaaggtacacgagatcgtgccgccgcgcgcgtcgcttgtcttgtctgatgaacattccttctgccggccggtgctttatcgagcttgacgatgagttgacgatggatccatcagggctgc

SEQ ID NO: 756 - DNA, 633 bp, Setaria italica
  source 1..633: mol_type = genomic DNA
gtccaggttgctactgctttcctagctctttgctactgtatcttattgtttgcatgttttgcactattgtgacgcctgataaacttgtagttcccgaagcgcactatagctaatcagcaacgtttcgtaccataaagttttggcttctgtgtttagtacaatggaactgtacgtgatccgtacaaaattattttgaaatccaaacaaacatatgatgaagcactaaaaattcaatgattattgtgcctatttaccaacttcatctgcataaacacatcacttaaagtgcagtctacaactccaactttttttctatatatgtgcgtaggtattggaaaagtcagcatggaagaatctgcagttcctaggctaacttttcttttaccgtaccagtgataagatagcctacctacatttccaagaggagcacgccactttatttgtaccatggttcatcaatccttcgtttatttaattatctactatgaaaaaaatatgactacacaataattgacagcctccacatgtgtgaaattttgatattccattcaaggcatgtttctaatgactctcatgcgcctaatctaactagtaatcttctctgtcactatctttctctgtgtgcagggatcg

SEQ ID NO: 757 - DNA, 87 bp, Setaria italica
  source 1..87: mol_type = genomic DNA
ctcctgtgtaagcagcagaaacgaccgcgattattatatatattcttagtgatctcaactagctactgaccccggccgcaggttggc

SEQ ID NO: 758 - DNA, 702 bp, Setaria italica
  source 1..702: mol_type = genomic DNA
gaggaggtaatggtctcccgaacccaccaggattcgaggattactcgcctcattcgttgcctgttacaacttccaactaattatgcagtagaagagtcgtgtgtttcattggtgcgcaagaatctcagtaaacctcaaatgcaaatgatttagaccctgattcatcaattctggccttgaattggtttaggttcaacgttcagtaaaacaccaatcgcgcttggctagtttagtactttactgtttaccttgaatttgttattagtggtcgcaactaatagaagggacaattcaggttaactgggcgcgttggagctatgttctagcgcattttcgagcttctgctgactatgatgtatgcttgtgttgaaaaataatgtgaaaaccttttatatgagctagattttgtgccatagttgttgattatatggaaagaagagctatattctgatgcgctgaaatgttgtggatgtagcgagagtgcccgtagtttgattccacaattgtataataaatggtcttcgttttcatttttcgaaacataatcttttgctaaagaattaaaacgggtatgtggttttactaaaattaccctttagacatactagcaagtgggttttggtgcagacataccaatgcagacataaaactaccctttagaatgaaagttgatgtagtttgaatcttctatggcagtatgag

SEQ ID NO: 759 - DNA, 102 bp, Setaria italica
  source 1..102: mol_type = genomic DNA
atgcaggtaacaattgatcgatctagtcactggaattatattctatcttgctggtgttcaaatctgagctgaaagcaactgggtgtcgttgttcaggtgtgg

SEQ ID NO: 760 - DNA, 193 bp, Setaria italica
  source 1..193: mol_type = genomic DNA
atgcaggtaacaatcgatcgatcttttttttaagacgcgcaatagcatgtttttcgttaagtagagagaaacagagtacatacagagcatgcacgaccgaataaacagctcgacaatcgatctgagttaaatgcaactgagtagtaggaagtcaggaactgatgcatgggcattgttaattgctcaggtgtgg

SEQ ID NO: 761 - DNA, 123 bp, Setaria italica
  source 1..123: mol_type = genomic DNA
atgcaggtaatataatcgatcgatctagacactggaattcttgctgttacgttgttcatataaataatacaactcaataggaagtttaggaactgatatgagagtgtcgttgctcaggtgtgg

SEQ ID NO: 762 - DNA, 124 bp, Setaria italica
  source 1..124: mol_type = genomic DNA
atgcaggtaatataatcgatcgatcaagacactggaattatattcttgctgtttgttcatagaaataatgcaactcaataggaagtttaggaactgatatgaaagtgtcgttgctcaggtgtgg

SEQ ID NO: 763 - DNA, 111 bp, Setaria italica
  source 1..111: mol_type = genomic DNA
gcgcaggtacacgggctgactcctcacatcgccgccgccgccataggcgttgcctggagatcttccccggccacgctctgatgctgttcgccgcgtgttttgcaggcgttc

SEQ ID NO: 764 - DNA, 107 bp, Setaria italica
  source 1..107: mol_type = genomic DNA
tgccttgtgagtgaccacgttgctttgcctttggttaactttcactggagtggtcggcgatgttgttgttgctgatgttatagtgctgtggttgcagccagatggac

SEQ ID NO: 765 - DNA, 1703 bp, Setaria italica
  source 1..1703: mol_type = genomic DNA
ggcaaggtccgtgaattctggcctcgccaccattttgtacttttgctgctttgattgctttgtgaatgttagcggacgggtggaaaggtgatgttttaagcatcagttagttgcacggaatgtagtcagactactaggtaggcttccacctagtgatggttagggataatgagaataagaatacactttagagtcatcatttagtctgacttgattgctccctagcataggaatgcaggctgtgctgttagttatgaaggatttcctaattgtatgctgtcataattcatagattggatgcatctgcaagcaaatatattctggcttctcgattgctgtattttgctgattggttgtaatgcagttacctttgtatctgtgtttgcaaatggctgtagataaaccatgtaaaagtgaacaattgatgttggttgtttcacttatgaaactggtaaacatgtgtccggatattccaaatgttgccccccataagaaggctgcaggtccatttgttcttatggccttgtcatgcacatattgtctcatgctgttgttcccatgtttgtttcccagttctgttcaccacaaccttatagtgatccttaaattatgaatcagtacagctgactcaggatggcaacggggcggtgcggggccggggggacactccccgtccccaccccgatccctgatctctgatccccgccccgtccctgaaacctcaatcgggggaacagtttgccctgtccccgcccccgttggatccccgcaccccgtcggagccctgtggggatgagcagccagtattacattcgagcaaatcaggcaaaatgtggcagataagttaacaacaagcaaatccatgagataagttcctaacaagattactagaagcttgcatgctgcagctgtgctccacgaggcagcaaaatgccaacacgtacacaacagacaacactctaattcaatgtggcagacttgcacgagaacgacgggaacagcggtagcggcgctggctgttggaatgcctacagctgaccatgaaggcacaaacaatgcttagagaagttggtcagccgcgcacagatgttgaaagcttgcccttcgccagcacggcgacacctccgcgaggaagagacggcgcatccagcgtctggtccttgcggccaggtggcctcgccttgcgttgtgcttgtcgacttgccgctcgtggcctcgtgcctggtgacggcgaaagtgaggtgagaactcaggagcgagatgaatgaatggagagtgctgggtggcggcggtcgtcctctgtgactgattagggttcgcggaaggccggaaggttggagttttatatatgtacgttggtgtattaagctgttgggctgctattttagatgggccacaagcattcgtgggtccccatggtgccccgcggggagaaaatcacccccgcccccgccccgataatgtttcgggtccccgcctcgcttcccccgcgaggggaaatttgtccccgtcactgccctgttcgggtttggtctccgtggggatctggccccgcggggggaattgccatccctacagctgacaatttacaaccacttaggacacgctagctatgatattatggttggtatgaaagatatcttgatgaacatataaaagtgataagtagttaacatggagttaaacttttcatgcaggatgtg

SEQ ID NO: 766 - DNA, 865 bp, Setaria italica
  source 1..865: mol_type = genomic DNA
gaacaggtacataccttattcggagatacttatatacagtatcactgtttgagtagaatacctgattagaatctggtggctgtagtctttagggaaccatttaagttctacaattggtggcgtgtcatacaagggatagatgaccccctggttactgtacaatcagcttatcatctctgccaatttcagaagctcatgcacttcagtatcatctataggctaaaactagaattcagagatggctattttacacatttttcatgtctgaatctcagttcaaatgttgaactaggttcctctaggcatatgcagaacactattagacttttatccactttgccattcatcatttctagctataatctccagaactagatcaccattaaagatggtagtggtaccatttacaggcccattaattgcatatcaaataccttagtcaacttgtctttctattttcaataattcaatagtttgccaatttttaggctactatagatgatgctaataggcgacttccagttttggatttaattggcatggctacaatatcactaataggctggctgaccaattgagttattagttttgcaacactgaattcacgatcatatatagcctatcaaaagatagcgtaacaatggtttttatgggcattaattgtgtatcaggtacatcttgagtctgaattgtatattccaatgaattatttaccttatgtttgtttagcatagtatttagaaaccgtcagcattacctgcatgcaggacatggtgatagatattgcccacaccaatgtgatattcctttatctaccgattcttactctatttttcatttgttgtctttggtcttgcaggctcta

SEQ ID NO: 767 - DNA, 94 bp, Setaria italica
  source 1..94: mol_type = genomic DNA
tgagaggtgagctggaagttgtcctgtgatcttgtgcctggacgctaatgcagtcagtctaatgctttgttggtctgatgttaaccagggttaa

SEQ ID NO: 768 - DNA, 580 bp, Setaria italica
  source 1..580: mol_type = genomic DNA
tctattgtaagtccattaattcttgttttgctggctatttctacatcacatgattgcctattcatatgtaattgccaccagtgttcctttttaagctcgagccatttaaaaaatattgtatgccctgaccccccatcactggttacacagtgtcatagagctggtacaaggtttctaatgtcatctagctttctcttttcaccagaagtcttgcttttaagatggaaaagttatcacaaatttagaattttggttggtccatgatacctagtcaaatgttcaaaaatcacaaggctctagatgggccttgggaggtgtactgcctgattgccagtatggaacaatatgtgaccattaggcgctaggcgccactcttcgcctagcgcctccaaagttgctaggcagtaggctctggaagtctctgtaatgtactttgtatgatgaacttaacattaaactgtacttagcctgttttactgttttcatttgctgatgaagcctaactgcacatgtctcatactgaaccttattatcattgatctacgaaatgtaactgtgagtgatgtgtttacaggtgtgt

SEQ ID NO: 769 - DNA, 3284 bp, Setaria italica; identical to SEQ ID NO: 221
  source 1..3284: mol_type = genomic DNA

SEQ ID NO: 770 - DNA, 779 bp, Setaria italica
  source 1..779: mol_type = genomic DNA
cctgcggtaagcctcctgcagttttccggcctcctccattgtgctgcaatctgtactagattccggaagctgatatgcatcatagatccctagttcttgcttcgattttgttcgctcgagttcatggttgcgtcggcatgttgctgttgctttcttggatagctttccctgagagcgagaccaaggggaaagcaacatgagtgttgcgcctttcacttttcctttacattgaggcagtcagatttagttctgggattgctactatgcttgatcttcgcactcagtattcattttattcaccttgccctcgcgggatgggaaaaatgatttttttttccttaggcaattcaaggagcgcagttatttgttgattgacctaaatgcgtgaggaaagctacaatgttgtcttgctttgattgtgggtaaatttgacgttaaaggctcccatcacacaatgctgatggaagggtggctgcttagctgtactttgtaaggttgcttggtgacgattttgtcaggttcattggatttagaccacacaatcctgaagcatgctgaatttctgttcctaattttctttaaactatacattgtccttactcacccctggaagaccacacaatgctgaagcatcctgaatttctgttcctaattctgtttaagctgtacattgtccttactctcccctggaattaggaatttaattctgacagatgttatgctacaattcttgcatggttgctgaaatgctgcgagggcttgcattgttgcaggttggg

SEQ ID NO: 771 - DNA, 937 bp, Setaria italica
  source 1..937: mol_type = genomic DNA
ccgcaggtattatcacaataatctcataccattcctgtatgcatcattttgtcatcatatttgcatctatgcagtcaccattttcatgttttcttgtggacaataaattgccaatcaattaccacccaagaaaaaactgtagtattcagtgtgtaacattaaaaacaaaatgaattcagtggtagttatgagttgtgatttggtgaaactatggatatgaaatagtaccagtgacaaaaaaaaacattcccatgttcttatcagttttattagacgacaaaatctcaatttaaccaatatgattaatcaaatatcttatagtaatttcataagggaagtttagatacgagtcatactttcattctttatataagctacttatctatgttgcttttgtcgagtttctggaagagctccaataaagtataaatttcattgccactacagttgagctacctttgtcagtgagcagacctctttatttgttcttacagtaagatatagcttatctacagaaaaatatccttccgtggccgacattcacctatcattgattggaccaaaagtaattttctcaacagaacttcttgagagttactatattaagtataagcctggatatcatgtgatcccatatatatctaaacagagcaaagatgtgagtgaatatcagtaagaattttatgccctatcacagagaacagtcattcttcttattgtctacataaaggttataggacaagatctaaatctgtatacttgagtctagggtgagtaaacagacttcatttgtattctcaacagtactatttatgtacctagctatagatgtagttgtttcttctcagtctgataacaaaagcttgcaaaggaggtttacctgttattgtaaagtacaagtactctgtactgaaaccatttcttgttgcagatttca

SEQ ID NO: 772 - DNA, 934 bp, Setaria italica; identical to SEQ ID NO: 264
  source 1..934: mol_type = genomic DNA

SEQ ID NO: 773 - DNA, 447 bp, Setaria italica
  source 1..447: mol_type = genomic DNA
acacaggtgtgatatgccgtgcctcaccttgaaccatttcctgaagaaaaggaaatatcctcagaaatttaaaatgctatattgatcaggttattattactcttggagtttggaagcgttatcttggattttggtttattctaggtgcatttacaaactatgtaaactatatttttatgtatttcaataattctagaaagtgacaggtagaactgatccacataaagttggatattgcagggacaggatccatacttaaatattcaatcattctatgctgcagatactgttcatactacacaatcaacatcacttttttaaaaaaaacttagggcaccttacttcaaaaagattggcatgcttgggaaactgtcacatgctcgtattaatacctatcctgtctggggtggagtgaattttaaagttgtttttctgttgcagttggaa

SEQ ID NO: 774 - DNA, 447 bp, Setaria italica; identical to SEQ ID NO: 773
  source 1..447: mol_type = genomic DNA

SEQ ID NO: 775 - DNA, 956 bp, Setaria italica
  source 1..956: mol_type = genomic DNA
tttcaggtaccgatccgtccatttcgccttcgttttcgcttctcgatgccagatctgtggtagatcagggcgtatgtcgggttgatttgtgctggatttagtggatctgagtaggggggggggttatggcatttgaaatctgtagaactgtgcggatctagctgtgtgtgatggtggctgcccagatctgcgattgcttggcataagccgtaggtctggtgaaatggtggctatttgcagttgttattattatagatctgggtatgcagatgtggaatttgaatgggaattagccggaattactcattattttacctggtgttgttgattcagtagatctgttagcttaattgatgctgatttagcttattcttgggtggatctgaacattgttggtctctattttaagaaagtagagtctccggttcgtaacatctgtttagatctagatgcttgttgtgtggaaaaatgtgcttattataatttaacgtagatattgttaaaaattcgaatcattctcagttagaagtgggctagtgacggctgtgttttgctattcaggtttctgcagtgttcatgtacatttgctaaataatgtccttgcaatctgtaattaagcatgatacattaggatgtatgaattcgatgtaatggtttgaaaggcatggcctatgtgttgttattccttgtaagatctagatctgcctgctgtactagagtgtactaggctagttggcttagaatgtgtctatgcctctcatgtacatgtattcctagatcttattgatcagtcataattatattacctagatgttaacttgctcgtacaggcagtcgtgtggtatgcagttatcttattagcttgtttatgatgtgcctttgtgttatctaatctaactgtttccatttgtgatttgcatctctaatgctgcttgttttgctctgttcaggctgat

SEQ ID NO: 776 - DNA, 777 bp, Setaria italica
  source 1..777: mol_type = genomic DNA
ttccaggtccagtcgccgcccccctctcctcccgtccatcatctcgtcgtcctcgtcgtttaatttccgatttgattcagaggagtcctgcgatttgcagttgcagggcgttagaattctgatttggggtgaactgttttgggggaatttagtcagatctgttggtgctagtaattttagggttcgaaatttgctgcgcgattcaaactgtgattgaggctggaagtaagtagttgctgtcggttttgttgtgcggtacctttgcagcggaagtaagtagttgctcccatcgaatcgaatttttataatttgcagttgtgggtcacgcgttacgcctgctctcgtcaaattgtgcagtgttatttaaatgcttctgtgctctattcgtagtcatcagttttgatcggtttgtgtgtaattgtggatgaattgcgctatttctaaagtttcagttatagtgtactagaagttgattagattagaaaaacgaatatgccttctatcaattcggtggatcccgttcagattctttaaattaagtcatgttcgtaccatttcttagatctgaatgcaaattggactagaggttgtgttcggtgcatgtatctctgagcaactgatatatcgcttattgatgcactgcataatggctaattaaattgatgcatatcataagttgctccacttattgataacatgttgaacccgtgcaattgctcctttgaaccctttataatttgcatcccattaaactgcttttttcccttgcagcctgat

SEQ ID NO: 777 - DNA, 1002 bp, Setaria italica
  source 1..1002: mol_type = genomic DNA
gtataaattcagttccttgctccgatcccaatctggttgatatgttgctccgatgcgacttgattatgtaccatatctgcggtttgcaccgatytgaagcctagggtttctcgagcgacccagttatttgcaatttgcgatttgctcgtttgttgcgcagcgtagtttatgtttggagtaatcgaggatttgtatgcggcgtcggcgctacctgcttaatcacgccatgtgacgcggttacttgcagaggctgggttctgttatgtcgtgatctaagaatctaaattaggctcattcgttcttgctgtcgactagtttgttttgatatccatgtartacaagttacttaaaatttaggtccaataatattttgcatgcttttggcctgttattcttgccacwagttgtcctggtaaaaagtagatgtgaaagtcacgtattgggacaaattgatggtttagtgctatagttctatagttctgtgatacatctatctgattttttttggtctattggtgcctaacttatctgaaaatcatggaacatgaggctagtttgatcatggtttagttcattgtgattaataatgtatgatttagtagctattttggtgatcgtgtcattttatttgtgaatggaatcattgtatgtaaatgaagctagttcaggggttacgatgtagctggctttgtattctaaaggctgctattattcatccatcgatttcacctatatgtaatccagagcttttgatgtgaaatttgtctgatccttcactaggaaggacagaacattgttaatattttggcacatctgtcttattctcatcctttgtttgaacatgttagcctgttcaaacagatactgttgtaatgtcctagttatataggtacatatgtgttctctattgagtttatggacttttgtgtgtgaagttatatttcattttgctcaaaactcatgtttgcaagctttctgacattattctattgttctgaaaag

SEQ ID NO: 778 - DNA, 165 bp, Setaria italica
  source 1..165: mol_type = genomic DNA
atggccgtaagtcccatcgatcgatcatctcttcccttctcttgtcgtggactcaaagctcatcgtgtcttgttgtcggatgtacgtgatggcgtgcatcgtgtcattggtgcatgcgtgtgtcatgtgtgtgacgtgcacgtgtgttggcttgtgcaggcgaat

SEQ ID NO: 779 - DNA, 245 bp, Setaria italica
  source 1..245: mol_type = genomic DNA
atgatgccggagaagccaaatttttgtaacagtgtttagggggcttatgaatgactcttgggggccggcggtgacggagactaatcttcttcctctgaatgggtgtatcgctgctcttttagctgctgagtgtagaactctggttttttttttttaaacttccttgtgatttttcttgttattatagcggattcgcatcggaatttatgtgaagaaaagaagatgcttcgggatttaaaaaaaaa

SEQ ID NO: 780 - DNA, 273 bp, Setaria italica
  source 1..273: mol_type = genomic DNA
ttcttcggcaattctttgggcccaagaaatgcaagctgagaggagccattatcgccagcctccttccccatttctttctctttttgttactgtttcttcattagcgtggacaaagtttccggccagtctatctgcgatcgttttcttctattcatcaagactgtaatatctattgctacctatgcttctcacttgtgattttggacacatatgttcggtttattcaattttaatgagatgcctgatgaggctactagcaaaaaaaaaaaaaaa

SEQ ID NO: 781 - DNA, 301 bp, Setaria italica
  source 1..301: mol_type = genomic DNA
tagctacgcggttacgtactcgcatgcaacacgcacgcatgaatacgggcagtgtttgttcgtgagtgcatgctgcatgcatcgcgtttgttttcgccgaattttcttttgtctgcttgctttgtctgcccggtggttctgaatgtagaaccacggacggatcaacaataatgtgtgagttgattgtttgtgttttgcctttttcacctttttcatccttcctccctctaattgtatggctatggagattttcttctccaaggtccaagctaggaaatgcatatgcatgtaatctattttt

SEQ ID NO: 782 - DNA, 424 bp, Setaria italica
  source 1..424: mol_type = genomic DNA
agaagaagagtgtccgtctccgtgcttatcatctacctcttgctgctgatgttacccgcaagcactgctgctgctgctgctcctgctcgtggatgtgtgtctgatcagtgagtgactggctgcttccttagaagaagaagaagatgcagaagaagataagaaggctttggcaattgctgcagcaaagccatgtcgccgcccggcggcttagtgattggtataatttggtgtggcagccaggattacgcgctggtctttacctgtactagtttggtcgtccggtatctttttcctcttttgtttctccccctttttcgagtctgtactaccgaaactgccgagagatttgcagttttgatctatcataattcctgtgttactgctgtcattcggacgcaaaaaaaaaacaaagtctagacgctct

SEQ ID NO: 783 - DNA, 244 bp, Setaria italica
  source 1..244: mol_type = genomic DNA
gcttgagccgtcctccttatactaaaactgagccgagctgagccggtggtggcgttctttcttggtgcggtgctcctgctatatataattctttctctcgccttcttgctgttcagtctgtctgtaattcctgatagcacaaacacaaagggagttctgtattccatgctcgtcgtcgcgagatacacaagaatttcaattcagagatgccaaatgtataacccgagtatctttatcttgcaaa

SEQ ID NO: 784 - DNA, 283 bp, Setaria italica
  source 1..283: mol_type = genomic DNA
gtcgacggggagtgatcaccaatttggtgggctgatggggacaggaggacatacattgaaacgcgatcgatgtgaattcctttctgtgtggatcatcagtttgtgatgtgtgtttaatccggagaggagattaaggactgtgttgtaataatgctgtatgcatggtgaggagagtgagtactgaggggtgattggtatgtacattaatgacaagggtggttaagggtagagattgtttgatcagtatcttatctctcgacggggttcgttccgtgccttttta

SEQ ID NO: 785 - DNA, 239 bp, Setaria italica
  source 1..239: mol_type = genomic DNA
tgtgccctctgctcgtgagtaggcgtgtagtagttgcacgcgccagcgtattgctttgtgctcgtgagctcttcagatcagaccagaccagaccagctagcagctgcctggacgtgcccgacgatgtaaaattattgtaaactaagcacagatgcgtatgtcagctgatgatgaatcaatgcaacggtgtaccattcgtgagtggaaaaaaaaaacccacgcgtccgcccacgcgtccg

SEQ ID NO: 786 - DNA, 372 bp, Setaria italica
  unsure 363: note = unsure at all n locations
  source 1..372: mol_type = genomic DNA
tgaggtgaatactgttaatatggtctcgggtggctgagttgtacttcctgagacaacatcgtcgacaatcatgacttccttgttttgttttcaccttgagtcatttggtcaattgtttgttcccaacctggtgttgaacaacagcgcattgcaagatggtaagaagagcaatctacttcttaccatcagaacagatgatcgtggcgtgagcatgaatatgtagaaaataaacgctcatacttgaaaggcttttcgttttgtatgtgataactgtgtaaattctgtttgtggaactagcagggatacatatttgggttcttaaataaaattggtcccgggtagactacgggtttcgcctctagnaaaaaaaaa

SEQ ID NO: 787 - DNA, 261 bp, Setaria italica
  source 1..261: mol_type = genomic DNA
gcgactcgtttctgagtcgtctgcggtggcgccaggtggaggttgctgccgcgagttatctttgctctgttttatcgcacttaatctatggtcggttcggttggcactttgtggtggtaaatttttggacctcgtgatggtcggtcgggcggtcggtgggttagtagcgtccgctgcgatgctaaatatgggtcctcgcggctgacttgtggtgtgtaccagtcgagccgtctaagtgtacaatatttattctggttcgtt

SEQ ID NO: 788 - DNA, 383 bp, Setaria italica
  source 1..383: mol_type = genomic DNA
tacgcgctgctagtagccaagtacctacctcgagggcacactgtaggcagtgtgccatattacaggttcagattggccgggacaaagagtacactgcgattttactatcctcggtatgctggtactacaggttcacattcacatggttactacctggcctgtggtatgctggtactacaggtgttgctctgaatagctcaggcttgacccaagtaagagcagtgcaaattcccaatttccagaaaacaggaggacctccaaaggacttcaatgtaattaaaatttctttcagaggtccttttgcaaggggctggatgtaaagtacttttataataatccaagccattgtgcttctcaaaaaaaggaaaagaaaaaaatttgtt

SEQ ID NO: 789 - DNA, 383 bp, Setaria italica
  source 1..383: mol_type = genomic DNA
tacgcgctgctagtagccaagtacctacctcgagggcacactgtaggcagtgtgccatattacaggttcagattggccgggacaaagagtacactgcgattttactatcctcggtatgctggtactacaggttcacattcacatggttactacctggcctgtggtatgctggtactacaggtgttgctctgaatagctcaggcttgacccaagtaagagcagtgcaaattcccaatttccagaaaacaggaggacctccaaaggacttcaatgtaattcaaatttctttcagaggtccttttgcaaggggctggatgtaaagtacttttataataatccaagccattgtgcttctcaaaaaaaggaaaagaaaaaaatttgtt

SEQ ID NO: 790 - DNA, 377 bp, Setaria italica
  source 1..377: mol_type = genomic DNA
tacgcgctgctagtagccaagtacctacctcgagggcacactgtaggcagtgtgccatattacaggttcagattggccgggacaaagagtacactgcgattttactatcctcggtatgctggtactacaggttcacattcacatggttactacctggcctgtggtatgctggtactacaggtgttgctctgaatagctcaggcttgacccaagtaagagcagtgcaaattcccaatttccagaaaacaggaggacctccaaaggacttcaatgtaattcaaatttctttcagaggtccttttgcaaggggctggatgtaaagtacttttataataatccaagccattgtgcttctcaaaaaaaggaaaagaaaaaaa

SEQ ID NO: 791 - DNA, 411 bp, Setaria italica
  source 1..411: mol_type = genomic DNA
agcgtcatctccgctccatggttccttcccgtggcctctgcggtcgtggaacggccccgctgcttgtctatgcagagaataaaatgtgaaatggtgtgcctccggacgccaggattcatgctaagttgggacatgagttgccttttgcttttcctacctgcttgctaccttcatgtaacgaagttgctaatatgggacctgagtttagtttctggttgtgaagaatatgaacggttcggttgtaattttgctgtgtttagtcggtttggttgcatagatgagctttgcgtctttggaaataatagtttcatgttttgtcccgcttcaaaagaaagaaggggggccggtcgaatagatccgagtgtaggtacggcgggcatggtgaactctaagctgcttctataatggcac

SEQ ID NO: 792 - DNA, 504 bp, Setaria italica
  source 1..504: mol_type = genomic DNA
tggaaccgtccctgcagtggctgttcgtttaattacaaggagggtgccatcaaagaagccatttgtcttgaatcatatggaccgtgtacctgctcgtctgtgggttggattactatttttcttggcacgattatcgcaccctgctcatacctgtgttagtcttcgtgaatgacgtggttctgaggcaaagtttcccgtgtacttgtattgtaaaaccgagtggatgtctgcagtgtttcatctgcaactctgaggtgtgttacggctcgtattaatgatctttgggcaagaaataaatctggaagccagtcgttgctgttgctttaagatgaatggtccactagcgttgctctgtaactttgttctggttgccattgtgatgtctagcgtctgccaataaaggatacgtggtacgtccaggttgacgagctgaatctttgaatgggctatgctgaaggagctgcttcagcctttactttgttgttcgatctgtgtgtgtttttt

SEQ ID NO: 793 - DNA, 203 bp, Setaria italica
  source 1..203: mol_type = genomic DNA
acgtccgtcatggatgggaaagtgtactatgaaaaacttttgagagcaaaggagtacgcattctgtatctattaatgcaaattcgggctgttgatttgtaattctagtatgcatttcttctttcttttgttctcatcaactcgcatgtattgcttactttcactactagggaatggagctctcgtcccgagactgatcataaa

SEQ ID NO: 794 - DNA, 437 bp, Setaria italica
  source 1..437: mol_type = genomic DNA
gacaccgccgggatgtcgacgaaacctttgcccgcccgcccagtatttgcgaatggagtcatctgattactacaggaatttttccggtgatgaaccaaaacaaagaaaaaaaccgtgtggctgatctgaccgagcagccctagttgtaaagcgctataccaccaccagatactgctatatgatggtatggttgggtgccccgtcttgctagggagctttttttttctctctcctttcactcttacgcttttcactagtggagtgtgcgcgtggtgtaatcgtttttacttgcgttttcccctaactagcccggtgatctcgcggaatgcgagatggagaaataatgcaacaaaaattttctgccacatcccatagtgctgttgtgttctctcctcacttttgagtcatatatatataatcaatagtacaattactac

SEQ ID NO: 795 - DNA, 262 bp, Setaria italica
  source 1..262: mol_type = genomic DNA
gggcaccgcctcatcggcaaccggatcacctgctgttggtgcgtctggtgaagaatactaatacaaagccatggaacggtggaactctgctgcctggcaaaggcccgttgtatcttgtatgaagtctccgtgcgcgtgcgcatgtaagacttaatgtgtggttttctgcattttcccttgaactaccatggtaatgtagtaccaaacagagatgatgacgaagaacaatcgaataaattaattggcgattacctgtgctgtc

SEQ ID NO: 796 - DNA, 388 bp, Setaria italica
  source 1..388: mol_type = genomic DNA
ggtgctctgcttcgctcgctgcagagtgctgtaaaggcaccagcatgtggatgtgtttctttatgattcacaccttggctttcgttcatgttttcttttcgaataaggcttgatgtaaagatcaagtggaacttcttggctgtttaagcattctgtaattctgtaataatataaagaccacaaactattggcatgttatatttaataaagatatttattccaataagataacccctgctcaaaaaaaaaaaaaaaagggaaaaaaaagaggctctcaaaagttcgggagtgcccaggacgacctggttggcaaagatatctttatagagcaataataattttgctaagatgaatgtggctaccatgctcctcctcatttcagttctct

SEQ ID NO: 797 - DNA, 233 bp, Setaria italica
  source 1..233: mol_type = genomic DNA
agtgtttgtttggctgcctatcgctcgcgccgccgcctatgtaacctgcgtgcgtgtgcattcgttgtgcgcgcatgcatcgtctcgtcccaatgaacatagcttgttgctgcttttggccccagagcctatcagcttcagtaacccacgtcgttcgtactttttttttcatggaacaaatcttcagaaacttcaaagagagagttcaaattgcaataaaaaaaataaaaggt

SEQ ID NO: 798 - DNA, 148 bp, Setaria italica
  source 1..148: mol_type = genomic DNA
acgtcctctctacatgcgtgtgcgtgcatgggtaggcgatgaggtcgttgattgagcagtgagcacgtgtataaatgtacttcaagtaacttggaacttgaactgttgatttcttacttggatggagttaatttacttggggataaaa

SEQ ID NO: 799 - DNA, 196 bp, Setaria italica
  source 1..196: mol_type = genomic DNA
gggggcttcctcgatcttcctgtctgtcatcagctgctcgtagccttgagttcctgtgttccttctctgagggagggctataaattcacttactccatgcctccaaactattacatatgtacacaacacactgtatgaaacaagaacacctctgtttctcatctctgcatatacaacctttttgattgaagactct

SEQ ID NO: 800 - DNA, 218 bp, Setaria italica
  source 1..218: mol_type = genomic DNA
acgatgcttcctgctgctgtgtcaggcctgtgtgccgcggttatcctatgatctgcccgagtggctcctatcttatcttgttgtgtgtcggtgtgtcggtttgaactgttatctgtcgtcgtatgtcgtttacaacatcttatgttgtaagaaacttgtttaatcctgcttcgtttctggattaataatcctgttatgtttcgtgtcaaaaaaaaaaa

SEQ ID NO: 801 - DNA, 1909 bp, Setaria italica
  source 1..1909: mol_type = genomic DNA
agcccggaagaacgcaaagtacctgagggcatttgcatgagcaagctctgtggcacgtttgtaacctgtcgaacaaacaacgtggctctagtactaaataaaagctgcgtgaacgtattgtgatcgtgctttgtttaagcaaagtgttgtggttatggtttggctaagcaacgaactcatcttttatttgtaataattacttaaggaactggcagttaagatttgagacgtctcctcaggtagtagagttggaaattctcatgccaataaagtataaatttgatcctctgcaaagccagatgagcaacggccagacctttcgtccaaccctctttagatccggataaaatcggacctgtgactaaagggagaccctttagtcccgggtgaaaaaattagccacctatagggaccctttaatctcggttggtgttacccaactgggaataaagccctcgaccctttagtcccggttggtgttaccacccgggactatagcactagtagagaactagcttttagtcccggttggtaaggtgcatatctcccaaaaatccatccgggataaaccaaccaggacaaaagggaaggggtctttagtcccggttggtgtcaccaaccaggactaaagggcctgccatgccaggcatgggataggccctttactcccggttggtcaaagtaaccgggagtaaagggtgcccatttagtcccggttgggtttcccaaccgggagtaaagggttaccctttagtcccggttggatttcccaaccgggactaaatgacgcctgaaattttcatgcatcgcgtacgtagtaccgcggcctttttattaacctttagtagttgagattttttttataatgaaatcaactagtatttaaacgaatgaaatttgtaattatacaattactatatatatacacaattcaactagtacaaatcgatcttaattagcgcgtattatatatataaataaatcaaactatatatctacaatcttcccgtcgaggtgttgctaggagcgtctaattgtcgtccatcgtaataaaattctccttttggatttaccacctcgtccattaggaatccaatgagaccttcacatattgccgctactctttcttccttcgagagtccttgttgaatatttaacatctataatttggaaatttgtgaatgttacacgaacaattaaatataaggagctagaaaataattaactagtaatagttttattttacgtactttaaagttgtgcggcgtcatctttagtcccttgggtcccataaaactgtgcatgtgctcacagatgtagtagccacatagattattcccgggttcctgtcttaagcacttcagtgtggaaaaaaataagttatgaaatattcgtgttatacaatgtaataaatgtgcaaacttcatacgtaccgggaagtctgtgttccatgtaagtttttctttgaatggacctttgtgtgtccttatgaattgtttccatgcgctgcggattagaataatgaatgatatagtgtaatagggataaaatttgggaaacaaacttttgcatagagataaagatccagaattattacaagcctagcctgtcttgcatgtcttggtactctactggatcttttctcaaggaactgaagacaataacgtggcttctttcaggctcaattataataaggatccagtggaagctgcgtacgtaaactgttcatgcatattagagctaactaacattaatcaggtaaggaaaaagataacaaaagtagacggtatacacacacttacttgaatttgtatggaagtagtatgaaatccttgaatgtttgtttgtctaggaaattgtatacttccaccaaggttttttccggtgataattgtttctgtttttggtt

SEQ ID NO: 802 - DNA, 275 bp, Setaria italica
  source 1..275: mol_type = genomic DNA
gactgcacacccttcaaaatatgttcaatgtgtggttcactatggacatgaccatgtgctgtgaggaaaaaaataaatggagaacctcatttcctagataaagtttcagcgatctgaaagcagatgagctgttcagctttcttgcattgagatccatgtagtttctgcttgaaatgtactagagtactcttcgtggtttccagtgtgctatgttgatttgacttcgaccatatatgttttatatggttgtttgtttatgtgtaagttatgtacaa

SEQ ID NO: 803 - DNA, 248 bp, Setaria italica
  source 1..248: mol_type = genomic DNA
tgaactgatcgcggtttggttcagagacacttgggaaattaaattggccgagtgcttcgatttgcttatttctccagcttttggttgcttggtttgttgattcagtgctctcatcagcttgttgagatttaccatttgttctcttcaactgtgtatgtatttttcttgtccatgtgttgttatttattcccttatggaaatgttgttcttgcattgctagagtaacccatttctattgtaagttggag

SEQ ID NO: 804 - DNA, 349 bp, Setaria italica
  source 1..349: mol_type = genomic DNA
ggttctgttgaccaagagtgccgagacagcagcactcgtgaaggcatatgctgctgatgtcaatctcttcttccagcactttgcacagtctatggtgaacatgggcaacatttcaccactaactgggtcacagggtgagatcaggaagaattgcaggaggctcaacaacgaccactgaggttgctttatgtgctgaaattgtatttgatgttggtgatatattttgttcaaataagcaagcatggctatgattttatcagatgtttgatattgtgcttttatttaaccacattgtaaaatgtgtatctattgataggtcaatatataagatgaattcattgggtgtaac

SEQ ID NO: 805 - DNA, 409 bp, Setaria italica
  unsure 175: note = unsure at all n locations
  source 1..409: mol_type = genomic DNA
tctagcaaccaataagtagtactacatacgaatcagtagtactgcactatgaacttatgacttccagtgtcaataagatttttgtttctctatgcaaaaatatttcctattggtatggtcagggggtgtttgtttctttagtgcctcctaaaatttctgtcacatcgaatgtttntatactaattaggagtattaaatatagactaattataaaattaattgcacaggtggagtctaatttgcgagatgaatctattaaacctaattagtcatgatttgacaatgtgatgctacggtaaacatgtgttaatgatggattaattagacttaatatattcgtctcgcaaattatcttccggtgtaattagttttataataagctcatatttaatcctcctaattagccttc

SEQ ID NO: 806 - DNA, 205 bp, Setaria italica
  source 1..205: mol_type = genomic DNA
tccggcacgtccgcggcatgtgatggaggatatgcgtgcagattatttcctcatcgagtaccaataagacaataattgttgttcctgttgttttctgctacaattgtgtgtatgtacttttgttgttgcatatatgtatttattataaatattttattttaaaaaatgcattacacgacttgtgtagcggttatcatcataccaa

SEQ ID NO: 807 - DNA, 200 bp, Setaria italica
  source 1..200: mol_type = genomic DNA
acggcatgaaagtccgcagtccgcacccaacccgacgtgtcaatttcatcatcgtcgattgtcacctcgtctcgtcttgtgattatgtttggtcttctttgaatttcccttttggatttcaccagcgatgatgtcagcaagttgtaagagaaccgttcgatctatacacatgacatgcacggttcagcgttcccaagtaa

SEQ ID NO: 808 - DNA, 218 bp, Setaria italica
  source 1..218: mol_type = genomic DNA
tagcaggattgcaccggaacatggcatgatgatgtgtactagctaaataaatgtcatgccttagatgtgtactcatgcatgcttatccttataactttcatttgaataagtaccggtgcatgtgatgaaaatggcaaataaacatcctccaaccagatggcgttggatagtatatatgtacgtacattgatattttattttaatgttaattatcataa

SEQ ID NO: 809 - DNA, 199 bp, Setaria italica
  source 1..199: mol_type = genomic DNA
tgctatagcgcgcgcctacctggcagagcttcgggttatgctaaaatggcttcagctctgactccaccggtgaaatggtatttctagtggcaaaataaattctcctgcacttctcgatggctgatgctctgccgtctgcatgtatgtttgatgttctgtttgcatgattgcatccacttcattttcttcctttcttttt

SEQ ID NO: 810 - DNA, 2792 bp, Setaria italica
  source 1..2792: mol_type = genomic DNA
cagaactttaatcatctcttaaaaaagttattgcttcaacagttacagtatacaggcccaggataatctcgtgccgacgactactgatcgttcggctagtttgttccggacggatacgaaaaggatatatttttgtaatcgactgcaacagatttataaggaattaagtggtatgtttatattcttttgttcacaacctaagcaattgttcgagatgttcaatgtcttgttcgtaatgtacaattatctattcataatgttcaatatttgtttacaatatattatcatttgtgtatttgtgtgtcgtgtttaatctttttgaattcgaacgatcctcatatatgacggataaactaattaatttaaaaatgaacgagttagcttgtctaattagttcaaaaggaattagttagttgtcctaaacatgagaacgtacgtagtatttgttagcagtaataaaactaattacctttttatatttatatttttttacggaatatttattttgaagctagaacatttttctcctaaacctagaataatttataaaaattccaacttggtaaaaatatttttaaaaatagtatccaaacataaagatcttgttgtagcttgaatgcttgatacgatttgtaacttaatttgggatgcttgatttgatattatggcctttttttagtttcaaattttcttcgcatgtggggtggggtgggatgatgtcactggtttgctttttgttgcatgtgcgcacttgatcaattgctacatgcattatgggccgcaaaagaaaacagaacagccataagtggtctaatatgataaccagactcagcgtggggtttctcaggcgataaaacaagatttattgttgaagcaatacctaatcacaatccataaggggtcaatgccctcctcccctgttgaagagcatcgatcgtccggctaatttggttccagatagatatgaaaatgatatgcgacgtatttacaacaaattaaatgattcttgaaccttattgatattcacatgtaagtaggatgtttcgtgccggtgatgcactcttgagcgtttgcacgtatatttcggggtttactatgagcaaaggaagaaccatgttaaaccccacattgtattttgaattatagctaatctattaaggagttgagaaataacacgtatacaattggagatgtactaaatgcatgattggtcatccacgaagctagaaaaattaacatgagaggtgtttcaaaatcaaaatttagattattgcatggggggctagcttttgcccccctccctccactggcggggaaaagttgtacgttcttgctccaaatccaaccccatgtaactaatcctgatggatatgacatgatcatttcgctaaccccaagcatccctatgatttctcaatcctaccatatatatggttgctgaatgagaaagtaaaggaatattgagattgttgcgatagcacagcacgtggcaccatcgaggtggaacttcattggggttaggtctgtaggacagtgggaaggatgcatgtagttctttttccagtggcgtcgcccctgtacacggtgcaccaagccagcctagatgagagtggtgaccctagacgaccattacttggttgtgctgtttgcaagcaaggactgagactttttggttggttggtcccccgagcctgctgggctaagcccggaccatagctcaatggttttttttttttggctgtagtgatgattttggctgcgtgaaaaaattaggcgggctcggtccagccttataacatcccgaaaattccggtctaatgctttttgtgggtatgtatggccgtatgggctcaatttttcggcccaaaatgttttgagtttttcctcggtttcaatttctgaaccggtctgattttggtgattatatacagtaaagtcaacttataatttgacgtgcacctctttgtacgttttcctttgcatcttttcgaagtaggccaaaagctgctattatgtctgatacttttagtgagcagaaaatttggaagaaattatggttcatcaaagcctcgaataaaatgaaaatattttttgtgatgccttgttcatgattgcttgaccgtgggacatcagctacaaagacgtcatattccagataatcctacatgttgtttctgtggccgagatgaagagattgagcattgttttttaatgtacccttttgctacatctacgaaatgctaaaccatagttatattgacttgttgagtcattgcaccaagatactgtgtgtagaagtagttcccacatgttggtacacccgggatgctcataatgaaattactaactctgaaactagtgtgtccttaggtgatagtcaagaagattcaagctcatgtgaatatgattatgttgaattgtacgaagccaattcagcctttaaggtgtggagttccgaaggaaattaagaaattgactccatcgcgagttggtttggtttcccttaatgctgatgcaacaattttcccttcttcatcaagttcgactattggtgtggtggtgcggaaccatttggatagatgtgtgatgagatgatgtcagtttttccatggcattactatatcataagttgtagaagcactagctctccgatgtgctgtgactctggcttacacaaagtgattttccaatccgattacttttcctttttgatggcaatccgattactttctctggtcaaaaggtgaatgctcttgataaagatcgatcttccacgagttctcgttgctggt

SEQ ID NO: 811 - DNA, 173 bp, Setaria italica
  source 1..173: mol_type = genomic DNA
aggctcgatggtagggcacagattctgccgtcagtggtggcgaggggacagattgtactaaatactaatgccctatgattaacatattcgtcgagaatggaacatcaacccgtattcagtgcatcactttggaaagggagcagaaaggttgtaggccagaggggtaagatcga

SEQ ID NO: 812 - DNA, 132 bp, Setaria italica
  source 1..132: mol_type = genomic DNA
tagataaagaagatgagttagattctgtggactaattttttcttagagataccatatatgtacttccttgattttgattattgttgctgttgctttaacacaagctgatgacaaaaaaaaaatactgtacca

SEQ ID NO: 813 - DNA, 304 bp, Setaria italica
  source 1..304: mol_type = genomic DNA
gtaaaatgcgttgaaatgtgatgtttttaccttggtaaacagctttgtttagataaagaagatgagttagattctgtggactaattttttcttagagataccatatatgtacttccttgattttgattattgttgctgttgctttaacacaagctgatgcaaaaaaaaaaatactgtaccagaaattcagaacctgaatcctgagcgcaccaaaaaaattattggccctgattgttatcattgcttagaagcccattttatgcttttcatatcttcataggaaaagcatatttttgtacatgat

SEQ ID NO: 814 - DNA, 582 bp, Setaria italica
  source 1..582: mol_type = genomic DNA
tctggatacttgtgtacatccgtagtggtggtctagtctggcatggaagcatgtgcgttccatttgtgtgtttgtgtttttgatcagaaattcaggaacctttacagtgtggaactgtagattggcatgcctgtctgctttctacttttgcagattgacatggaactctcagtcacaattcttcggaaaatactacatggtcacttaaacatattaatttccctcatattccaaaattcatcaacttgtattgcaagaaaagctgttgagcagggccatcactggacgtttcaccccagtttacttcaattcgttgataaaagtttgaagatcagtctcctcggttagtttgttattttcgtatgaattaatctagaaagattttgaaccttaactttttcgaccaaaatatgaaccatggatatgccaagtttaatttgttttcggaagttaaaagttcgcttttgaataatttttcaccattttttcgctcgttttcccattttcaacatagctttcgcatagctcggctgcgactccctatcaacaaagtgcagaattattgtaatgtggacaccggtg

SEQ ID NO: 815 - DNA, 257 bp, Setaria italica
  source 1..257: mol_type = genomic DNA
gaagaagttgccgataactttgttgcaccgtgactccattgtgcgtgcagtgtgtagccgtgaccctaagcttttccgtcagtaaactgtgaataagcagctggtaaaggactgtgcaccagctcacctcagtatttggttcagaatctcagcttgcctatgtactacatttgggtgtgacttgtgagtatgaatttcaacaagatgtacaaatcacaaaagttatcaaagtttatgtgaagtgtggcatacatgta

SEQ ID NO: 816 - DNA, 180 bp, Setaria italica
  source 1..180: mol_type = genomic DNA
gagcgcgaataacaccacgcacgtctcgctgagtcctagacgtgatatgtagtaagaaaaatctgtccctgtgtaaggtggcaggttttttttaagtaactttgagtcgcatcccgccgaattgtcatccatcagcaaccaccgccgaattgtaatcgctttaatttcaataaaagcagg

SEQ ID NO: 817 - DNA, 1259 bp, Setaria italica
  source 1..1259: mol_type = genomic DNA
tgcaaataattccaacaaataaacagtgtgtcgcccagtgccagatgcccatgtccacatgcaccatattctttgtacaagtttgtgatttgagctactagctactgttcgtttggtgtttatttgtatttggaagtattgccttgatttcagtcaccgtgatgattttttaatgtaccttgggccaaagtgacaaccagtcacattttactcaaaaaaaaaaaaagataagcagtcacattgaccatttcattttttgaactatataccctccatcatattcgcattacctcatgcgaaatccaacagttactcatgcaatcgctgcgccgtttaggcacgaatatgttgtatataaatacagatatatataaaatattgtaggacgaattttaattgattatattcactacacattctccataatattgcactttcctgtgactgtattattaagtatatattttcaatttataccctaatcgatacattcctttgttgagagaaagggtcatcgtagcacttcgttccagtttcacgctgttagtttcaaaatctaacgtataggaaaatctataagagaaaaaataatcaagggcttatttgtttaagcttcctggtagctttttagtgtaaaaagttggaagttcaaacaaacagcaaacttctcgtgcagcttagaaaagctaactttatatgaaaagctggaaagcttcattttatgagcttttcgtagctttccgagctcagaaaactaacacacatattctaaaagctagtgttagtttttcagaatcaaaaaatccaacagcagcttttctgaaaggctcaaaagctacagctcaaacaaacatgtcctaataatttaggatagagagagtgtatgttagcgatccccatcaaatctagctgttggctttcaacgtgcggatttatttaataaaaaaatattttagttccatatgtgtcgatgatatcgttgtagctgagttctgcactcaatctttcgtgtactcaatcattcttgttgatcgactccgcagggcagacaggtatataaccaacagaaaaatattcagggttttattttagagaatggacttatgctgagttgtttgtcctgtcatggaatcatcaaccatagttggtattccaggcgcgtgagtgctgctgcaatctatcgtttgggcgtgttcctcgtgcatggtttcttcggacccaggtaatgcagtggaagcgtaaccttgagccttgggcag

SEQ ID NO: 818 - DNA, 291 bp, Setaria italica
  source 1..291: mol_type = genomic DNA
agggatcaaacgcatcgcagctgtgctgaatcgcactctcgactattccattcgtccaagaataagtctgcagctccgtgtttcgtggtctgatcgaatgcttgttgtgtgctttctgcttccttaattgtgtccgcaggccggtgtccaggccggcctatttagctcagtcgtcgagtgctatgtcagcagtgtgcccagtgctgctttatcgtgctccagcctcagagctttcggctgtagcattcatttaattgctatatacatgtcagtggtgattgtcgtttcgta

SEQ ID NO: 819 - DNA, 116 bp, Setaria italica
  source 1..116: mol_type = genomic DNA
tccgttcaattggcactcgtgttcggatcatcattccagtttgttcatcgcctttctgtctacacgtcaatgtttgtgttgacggtcttgtgctttgcagcttcattacatcggca

SEQ ID NO: 820 - DNA, 582 bp, Setaria italica
  source 1..582: mol_type = genomic DNA
cctgataagcttgaagtattcaagaagtgatatgacaagcaataaggattagtgcagatccctgctaagataaggtttctgcttctcagtcatcatttgatatggttacaactctagttgtaacccaagtgtgcataggtgcaccgttttctgttatggaataaatgacaaattatatgagggtgacggattctgttcacattcacagttaagaaaaaagctcaagctaaatttgtttcaggcacaagaagtagcatttgaaatgcccaaacaacgtgcagcactttaacaattgaatggaaaaagagcgcaactaaaggaatcatgcttcatgggaaatcagaattgcataatacctccatgttaggcagccaacataaatacccaatctcagattgggattcaaattctttacagggcaaaataaaacaaattattagtacacccacctgcaccgaaaggaaaaggcaacataacttgaacatgtaacaactaaaacaggagtgctagaagacaagactggatacctagtatcagcaaactcgtgccatgatcacagtttcagttatttatggttccaac

SEQ ID NO: 821 - DNA, 816 bp, Setaria italica
  source 1..816: mol_type = genomic DNA
ctacgacgacacaacgttgcacgacgactcccacaagttaccacttgcagttaataattaaccgctcatgttgcagctagcatctttatttacatttgtttcttcagacgcacgttgtttgattctttctttgcatgcattcagatgaacattaggatggtttctcctttttgtgttgcaatttcaagatgttgtactattggattagggatcagttgatgcaataaagctccgttgttttttttggctgaacctgaatgttcccttttgatattgtgatttttttatgggtggattttccaagacctgcacactagctagtgagtagggacctttgtattgcaattgcaagatgttgtaccgaattagagatcggatgatgcaacaaacctcctttctcttggctgaacctgaatgttgcctttttgagattgtgaattttgatgtaggggtggattttcaagacctgcacgctagtttgtcgtcagttggaataacacatgctgagaggatgagtcaattgcaagcgactctaatcctcactaaaatttatgtggctgccaacaaatagcagtagtagtacgggcatcgtttggtggggcttcagattaccgatacaattcacgctataactggaatctgtaggctaaacaaaatgaactagatagtactccttccgtttttatttataagacgcacacgtatatcaaaatacaaactttacaattttttatcaataatttgactattaattttttattttataatataaattttatactctacggtgattataagtttacaaccataaataat

SEQ ID NO: 822 - DNA, 193 bp, Setaria italica
  source 1..193: mol_type = genomic DNA
gggtcatccgtggtagctccatctttgcttttctgggtgtctcgtgtttcattctcgttttgccttcggtaaaaagtgtgcagaaacagattgcaattgtgttttattgctgttttcgggtggtatgttttcacatgtgtaatttgccattgttgtaccaagaaatcattcaataaatgccaattgtttgtgt

SEQ ID NO: 823 - DNA, 235 bp, Setaria italica
  source 1..235: mol_type = genomic DNA
gaaggttgacgtacttgttgcagcaatggaggttgaagaagaggccgttgcgtgcccagccaacacacacgttcatagatcaagttgagccttaagcttggtttttgttgttccatccattcttttgattcgcattggttgtactacactttgttgtccatttttcatctcagccaatctgttacatactatacatgtcttaaggaaataaattatgtatatgtatgttcctgac

SEQ ID NO: 824 - DNA, 284 bp, Setaria italica
  source 1..284: mol_type = genomic DNA
taggatggcggcctcgctcgtcaggctgcatttccatgactgctttgtccagggatgcgacgcctctatactgctggacaacagcaccggcatcgtgagcgagaaagggtccaaccccaacaggaactccgccagaggattcgaggtgatcgacgagatcaaggtcgccctggagcacgcctgccccggcaccgtctcctgcgccgacatcctcgccctcgccgcccgcgactccaccctccttgttggcggcccctactgggacgtgccgctggggcggcggg

SEQ ID NO: 825 - DNA, 1690 bp, Setaria italica
  source 1..1690: mol_type = genomic DNA
caccctggcaagcgcccccatgctcttccgtatattcctcagagtgcgcatggccaagctacgaggaaggacactgctggttcaggtggcttaagtttcagacatacagctgcagcaacctcctgatgaactgatgaacgtgcaggcacaggtctgtgatctgaagggtgagattaggagtataatggcaacagagcgccctgcatcaaagggacagaatgatgtcaggccttcctctttttgcttttgctttggtccgtgaggctgtaaattggtaggtgaagtggctgattgttaactgatgatgttgtagcaccagattgtaaccatcgaacatggcctcattaagttatagtttgtgattttggtaattgagtgataatataatgttgacgtcagattttgacacgtataggatcggcgtcaagggaggaaagaattggccgatacggtggattaaaaggttacgattgggaatcggccgattggtgctacagttgggaatcggccgattggcgctgcaagtgttttggcagacggagttggtggagatcggccgattggaaggctggaacgattgggccaatgtgggcttaaagtgggtcagagaaagaagatagagaaagattggcccgtgggagtacaataaccaactccgatacgagttgtgtttgtaaatattcgttttcgtttaaaattagagatagatcctagtcggttaggaaagcggttgtaacaggctataaatagctatcttcagagatttgtaaataacacatcaatcaatacaaacaaatctattttttcatcgtactttaccttcaagtcgacgacttcgccaatacttctttctttcacgagttcgtacgggttggcaggattgcatcgacaatacttctttctagttttatcaccagttatccagcttgagattggaactgtcggctttatcactgttcttttatcaatcatcgcatagccgattagatctatttcaagtgttgcctttgtacctttgtctagtttactctagtagtttttttcgcaatcactacgtgattgtcggctgtatcatagccgatcatccttatatagcaaatcggccgatttgctgatacgcttttcgagacagatcggaaccttagctgatcggagcccctggaacttgacacgttttcttccttgccaatcaacaggttagattggctggcacgccgcgtgaaccgcaccagtgcgatcacctgaacaggagctaagcagattctctcgggtcgtgtgtccgacgttgagggtcaatcggctgacttttagtgccaacacacttttggcatgcccagtgggaccacctcaacatccagcatgtcaaaggccgccgaagtctccgaagacaatgtcatcgaggttacggaggcagatctcaaggatgaccagaaataagaattggcaaaacacctagaagactacaagaaggtatacctgcaatctttcagtcgtaccaggagcagggaggccatcaaaaaagctcctcttccaactccccgccagatcactattgctgagaactcgggcaagatgtccgacatgattcaacagtccgtttatcaggctttcatcgaccaatcaccggtgatgaccaacacggtgtacaatgccatcatcagttccctggccaacgaggtagctcatggat

SEQ ID NO: 826 - DNA, 303 bp, Setaria italica
  source 1..303: mol_type = genomic DNA
tgaatccatgcgcaggactcagggagttgaggctagccgttgtgctcgcgtttgctgaagaataaagagtcccttatttcctctacttttcgaaatgcttcatcaatagtgtcctcgtcacatgtttccacaacaagtcaataaacacatctgtgcactggcgttgttgttatcattttttccttaattaattttgagaaattccctgtttcgattttgctgaattgcatgcacgcaagcactgtaattcaatctctgaccttaagtattgtttcgttctatctggttgctgtcaatgtttca

SEQ ID NO: 827 - DNA, 448 bp, Setaria italica
  unsure 446: note = unsure at all n locations
  source 1..448: mol_type = genomic DNA
tctcatctgggtgatccgatcaccatgcatgcaatctcctgtccatcagttcacttcagaatcagggggcgtccaaagaataaaatccagctattaattagctgcatgctaggtcttctcgatccatcttcgttccacgtccatccaaccatgagtgtgtttattttattacgattaaattacgacatagaagaatgggcatatacaagaatgggcatatcaactacattgttgtctgaaaatcattaagttattgtaagcattctagcgtgttggatggattaatgttgtctgaaaatcattcaagttattgtaaccattctagcgtgttggatggactggtcatgaaataaccgaccgtaagagtatgtattgtaatctttctgtttcttggtcaaggaagaaaatatatgtagttattgttactaaaaaaaaaaactaaaagnga

SEQ ID NO: 828 - DNA, 120 bp, Setaria italica
  source 1..120: mol_type = genomic DNA
gcgtcgtgacacgcacgcatgatttgttatttttttgcagagaattaattaattattatatcctgcggcgcaccgacggttgttgatgaacaagtttacagatgtttttttttcttttgg

SEQ ID NO: 829 - DNA, 138 bp, Setaria italica
  source 1..138: mol_type = genomic DNA
tatgttttccttcttctcagtcaacctagctatatggtggagtcaaacttcgtattttcatttttttactcctgttacttgttaaacttgttttttgtccgaagtcatatgtgtaataagactcaccatgtttgaagg

SEQ ID NO: 830 - DNA, 226 bp, Setaria italica
  source 1..226: mol_type = genomic DNA
caagtactttcgtgcacggcctgatacacgaggctatgttatgctacctgatgttgttttcaccaagtccctttggtgttggcaaagcaatggcggcatttgtgagttgcgcatatgagggggtgatactcttgtatgttagtgtggttgtgttgtcgcatcaagaagtgagaaataatgcagtgtatgaataaattgttaaatgaaaatgcaactatgtttctgg

SEQ ID NO: 831 - DNA, 305 bp, Setaria italica
  source 1..305: mol_type = genomic DNA
gactacagcagtcctaaatgaagaatatgcttatagtgtggttcagtacggaccgtatgctgtgagcagataaataaacgaagtgccttgttccctgaacagaggtatatgaatcttaaggtagatgaactaagcttttattactttgagatccatatagcttctgttttagaaactagcactattatgcttcctttgtgccatattcctatgtttgctccaccgagagacagtttggtgcttgttgatcagtatttgatgtaattccaaaataagatgtgtaatgtattgtcatgttaacatac

SEQ ID NO: 832 - DNA, 228 bp, Setaria italica
  source 1..228: mol_type = genomic DNA
gtccgatggattgaaccgatcgatcgagtgcagcgtttcaatcttcgtcgtcgtttgctttgctcttcgacacgtgacatggtcacgaatttgtatttacaaatgatgtgccattcatggttcttgtgttcatttcccttcctttttttttgtttaaatcgatgtaaagatctcatccgatctgcggttctcgtctttcaaggaaaaaaagtgtgttttactttttaa

SEQ ID NO: 833 - DNA, 232 bp, Setaria italica
  source 1..232: mol_type = genomic DNA
cctatacgcacggttactagacagtgcgccacgctccggatcaaggctgtataccctcgtgtcttttcgttttgaataaacgggaacaataatgtacgaaagtagtgatgcaaggaaaaaaattacaaaaaaatgtattcactgcacgtagttagtgaccatttcacttcactgttaaccagggatagatgcaaggtcctagaagagtaccaactggcacccactagttgac

SEQ ID NO: 834 - DNA, 117 bp, Setaria italica
  source 1..117: mol_type = genomic DNA
tcaggagggcgctgcttgaccgttttatttgtggagagtgttggatttgtatgttggtgttgatgttgatgacatgttttgattgaataatcatgaacggcttgacgcccgattaag

SEQ ID NO: 835 - DNA, 264 bp, Setaria italica
  source 1..264: mol_type = genomic DNA
tggagaagatgatccgtgtgcatgcccgtgagtctgtatcactgtatgtgtttgagtgatagagactcagtaaataaggagctgtccagacacccaccagtgtgatgtatcatatcatgtttgtgtgaaacaccagctttgtgatgctgtggactgtgtgtggttggagaaccatgtggctacaccaagcttctgttcacccaatcagtgtggtttgtgccgtaatggtgtgctgttcagtggaatataatctggtttccttgt

SEQ ID NO: 836 - DNA, 192 bp, Setaria italica
  unsure 183: note = unsure at all n locations
  source 1..192: mol_type = genomic DNA
ctcctccgaacctgatcaccatcggctgcaacaagctcaatttcactcttcttatgcatgtatgtcatgatttgcatcgccattgtttcgttccatttgctatggtgaactttaatttgtgtaggtttgtatcatgattggatcgagttggtaataatgttaataaagtcgatcggtgtttcntctacaaaa

SEQ ID NO: 837 - DNA, 263 bp, Setaria italica
  source 1..263: mol_type = genomic DNA
agatgagggcatgcacacacacatgccttcctataatatggtctgctacaagtaaataagaagccatctgatgcaatggcttggctgcttgatggtctccctctcctgttactgtgcactactgtgacttgtgaatcacagtatcatgtggccttgtgattgggaatggaaaatatgaggtttccaagctactagtattatccttgtatctgcatgtgttgtactgtttcagtgaagtaaatataaatccagtttgcttgtga

SEQ ID NO: 838 - DNA, 231 bp, Setaria italica
  source 1..231: mol_type = genomic DNA
catgttattgcctggtcaatctaagtgtggagcccaacttttcttgtttcacgttgtaattttctgctttgtagtcgtatcattatttagtagacgcaaattaataaagggctccacttctctatagtcaatgtagagtctaagtgtaaggtgcaagctatgatgaggagacgctgtaaccatgtcaacatttgaatggaatagtattccattttctcatgtaatcttttg

SEQ ID NO: 839 - DNA, 314 bp, Setaria italica
  source 1..314: mol_type = genomic DNA
gatttctcctggacattcttatattgcggttgggcaccataaacctatagtgaataaataaaaagagtgccataattttcgaactatcgtttcatggaacatgatcaagcagcttgctgaggttacaaagctggtgtgcttcatgatctgtatactttcatttcgaaacgtatatctacaatctacaacttgctcatatattgtatgtgtatggtattgatatccaccaactggagttggatgtgtgtaatgcccctgtttgcccctgtttctcagaaaagcaaccattgtacactacgggaaatataatatgc

SEQ ID NO: 840 - DNA, 167 bp, Setaria italica
  source 1..167: mol_type = genomic DNA
ctgtatcgactcaatctaaagttggagcccatcctcctttcttgtttcaagtctgtacttgtgttatgcttttgttagaatcaaattaataaagggtgtccaactggagcagtataatctaagttgtaaccatgcaagtttatcaataaaataattactcctttttt

SEQ ID NO: 841 - DNA, 418 bp, Setaria italica
  source 1..418: mol_type = genomic DNA
taagggatgaagtggttcctctgacgttattaacacgacgtgatgtggttgctacatgtcagtgatcattcatcactgacatagcgtcaggggtccatcgtcgcagcgtaaggggggcggcataatgcatgtctatgtaatgtatcagtcgtcgttcatcggctaataccaccttgcatgttctctactctagctacatctccacagtgcctagctgctagtagtgcagcgtcgttgtaaacttaggcactgtttgtttggactttcaagtagctttccaccctaagaagccgaaagctcaaacaaatggtcagtttctgggctgagctttccgaaagccaaaagcccagaagctgcgaaatgtgagttttctgcagcttttctatgtcaaggtcgcgaaaattaccctcctaaccaa

SEQ ID NO: 842 - DNA, 527 bp, Setaria italica
  source 1..527: mol_type = genomic DNA
gtcacacgcctacgtgtaatcgtgtatacgccgcagcacgccctggcggcaacgggtgtgtgaactcggaacggaacggcacgggcgcggcagcaaccgccgggaactacccagcagtcgccgtttcactctacgggcgcgccctctccctggctataaaatccggaacgctctgcaggaccagtgccggagaatctgagcgcgcactacactaaacttgtgccgccatggcgtccagcctcctggccaaactgaagcgctgcgtgtcgccgccgtccctccgctcctacttcgccgagttcatctccaccttcctcttcgtgttcgctgccgtcggctccgccatctccgcccgtacgctgagttttctcttccaccgcgcgcgcgctttgatggttctcgcacgttacattctttgcattgcgggcggttgcattgacgagagcgcgcctgtgtttggcaatgtgtggcagggatggtgacggcgctcgacggcggcaccgcctccgacgcggcgtccctggtgg

SEQ ID NO: 843 - DNA, 1742 bp, Setaria italica
  source 1..1742: mol_type = genomic DNA
ataagaatgtaagagtgctaattgtgtgcaatggttacttttgtgttgatcttgttaactgatatacatgcagcagtgcaccccggctctgtcctgttacgaaaarawagttatttgggtacatgttattttgctggtagagaaaccttgtaaactcaagacattgggtgtgcagtttcgctacatataatcggggctcgtccctggtttctaaaaaacaagtaataacttcatgccctcgaattattcatggaaatatttataagcgcctttgtgaggtttcttccttccacatttttagttgaaacatgtgattacttgcatcccaaaatttcatggcttgatctgtgaatgtccaaaagatcttagaaggcatggttttatatcttcttagaggaaaataactggcgtaaataaagaaataaagataatgcagattttgaccaatatagggtgtaattttaggagaaagtcctaaatgtagacattgacctttccaatgcatcatcaattgctataaaatcaacataaccaaaaggtaggttcgggtacggtccattattagaaactagcatatatatacccatacgttgcaaacttgcaatgggagaaggaaaaaaatcatcaaaatggtctattttttttaaatactttgtgaaaggagctaaatttaaaaccttccacctcatttgaaagcctcaatttccttttaaatgcctagtcgccacaacctttctagttgatcgatcaatttgtactgtactctatggcctaattaccttatcctcatcttcttgacttcttcgttcttcctagccacgatctttttcttcctcgctgggatttcctctattggccgcccctacccttccatagctatgcataattaaaggtaaaaaaatatacttaatttacaaggacaactattacaagaggacatataaaaatatctctcttttttctacaattatcacaagaatgacgcactgttaccatttcttttacaagaatgagcagatggaaaacaatcggttttggcgttgagatcttaggccgtcccgtagcataatttcattgcactgtaccaatattaagaatttgttaactgtgcttgctaggtgttatggggatgaaactaatctcttatatgatgaaacttcctttcataatgaccttggtaaatcagcaaagttacagatatagcaacaaatttaatgctcatgaaattccaatgaaacacctattgagattggccttgatcatctagagtttgaatggtttgctatcaaaattttgacctaattatttttctactatttggtttgttaccaatatttactgacctatcatatttctatttctgtaaagatgaagacaattgagaatctttctcacctaagggtgctaaagtttagctttatcacatcggatgtttagatactaattagaaggactaaacatgaactaattataaaactaattgcagaacccctaggctaattcacgagatgaatctattaagcctaattaatccattattagcaaatggttactgtagcaccacgttgtcaaatcatggactaataggcttaatagattcgtctcatgaattagactccatctatgtaattagtgttataattagactatattcaatacacctaattggtacctaaggggtgtttggatccccgggctaaattttagcccctgtcacatcgaatgtttggacactaattagg

SEQ ID NO: 844 - DNA, 182 bp, Setaria italica
  source 1..182: mol_type = genomic DNA
gcgctgaccgtcgcgttcgtctccggcatggcatgagcaagccgagcatgccgacgtgttctttgatttgcttgtcatacgcgtgtagccggtttgaccagcttttgcttttcggtgtttcctgtttaagttgctcgtcctctgtgtggacgtgtcctcgaacaatttggatcactattctc

SEQ ID NO: 845 - DNA, 292 bp, Setaria italica
  source 1..292: mol_type = genomic DNA
atcgacagcctctcccgccggacaaccggaggcgtgaactgtagatatatcagcggccggcctcccccactgcaaatctcctgaatgctacgtgtgcatcgttggtagcttccctgctagtgggatcatgcatgcttaattatgatctgcgtgcctcctgtattttccgagtccactgcgtctgattacctttttttcttcttccaaactagtgtgattgtgctgttttacatatcagtgtacgtaagacaacttgaaaaatgaaaaagaaaaaggaagaagtgtgtgatgt

SEQ ID NO: 846 - DNA, 440 bp, Setaria italica
  source 1..440: mol_type = genomic DNA
gatttctcctggacattcttatattgcggttgggcaccataaacctatagtgaataaataaaaagagtgccataattttcgaactatcgtttcatggaacatgatcaagcagcttgctgaggttacaaagctggtttgcttcatgatctgtatactttcatttcgaaaagtatatctacaatctacaacttgctcatatattgtatgtctatggtattgatatccaccaactggagttggatgtgtgtaatgcccctgtttgcccctgtttctcagaaaagcaaccattgtacactacgggaaatataatatgcataatggttgctctcccaccttcatgaggacagcctattggatgactcgcatcgggtgccatcaaagaacccatcaactactatattcatggactggaaggaaatgaggcaatcatctagaactaa

SEQ ID NO: 847 - DNA, 348 bp, Setaria italica
  source 1..348: mol_type = genomic DNA
accggcggcgccaaataaaaagcttaaatacctgtccgtctcagttcaacaccgcttgattatctccatttttccccatctgaacgcttctgtaactattgggcgagcatgcgtgcccatgagcaatgctaccattggcttgctaaacatgtgaatgcatggtacatagctccggctatacctttgcacatagtgatatatttacacgaatgtatacacagcgatcatattcatacgacaatgtaccactagattgccaattcgttggaacattataacatggttgttttacttacgtaaatgatcatatgataatacaaggaaaaagtgtatttttcatccctacaa

SEQ ID NO: 848 - DNA, 493 bp, Setaria italica
  source 1..493: mol_type = genomic DNA
gttcctggagcagtatatctgtacttgtattttgagatgcaagatttgaaggtcccgtggcttctccatcattcttggttctttctgaatccttgaagggctgttagccatggagcattgtgaatggtggtaaagtcgtactacatgaaatacttcagcagtctaggtcgtcaggtcagtcttttttttcccgacaacagcaccgcgtcagggccttcctgttgtatgcagttgatctgggttttccaagacgcaagggtgtcggcagctgttgcccttgcagtttgagtctttgagagctttgagttggtttcagcacttcagtacatggagccgagtttgcattttgtaaccaaccgccccggcgtgggtgttgatgatttgtgcttgtaggttcttttttttctcttttcttgagacagatgttactgtttgtggaggaacaaattgtttattcttaaaatgttttacatactgctatgattgaagaaca

SEQ ID NO: 849 - DNA, 210 bp, Setaria italica
  source 1..210: mol_type = genomic DNA
gtgtcgtcaatgtatgggtttgccgcgggacgggtggaagtctgaactctgatggtgcaggttgtttcgtgttcagggagtcttttgagccctgaatccgtggtgtcgtgtctttttagctttgttttgagtcctgagatgagacacctttgcaagtgatgtggttttaaaccttggttaaatcattttgcaaataatctttcgtagcaa

SEQ ID NO: 850 - DNA, 226 bp, Setaria italica
  source 1..226: mol_type = genomic DNA
atctttctcttaggcttgtagaatttccaggagactttactgggggactttgctattttctctaccaccaattttttgtgcaactattgaggattaaggtgttaaatccccattgtcttgtgcgagatgttttcgttcttgatatcgaacctatggtaatatcttatttcaacatttttgtcgctgcctaagctcaattcctgtggcgtaaagaacgtaacgtaac

SEQ ID NO: 851 - DNA, 296 bp, Setaria italica
  source 1..296: mol_type = genomic DNA
acgatgcttcctgctgctgtgtcaggcctgtgtgccgcggttatcctatgatctgcccgagtggctcctatcttatcttgttgtgtgtcggtgtgtcggtttgaactgttatctgtcgtcgtatgtcgtttacaacatcttatgttgtaagaaacttgtttaatcctgcttcgtttctggattaataatcctgttatgtttcgtgtctgtttggtgtcgatctactattgtctgcttcgtcttcgtctgtttacaatttgggagtacgtctgctatggcaacgctcgcaataggtt

SEQ ID NO: 852 - DNA, 204 bp, Setaria italica
  source 1..204: mol_type = genomic DNA
gtagctggttaataagtagttcgctggtggttaatggttgggttgttgggtatactctgtatggttccattccattgcgtactgctgccgtgtgtgtttccattttgtattatgtggtataaattgttcgtagcgcctggttggccatgattgttcatatcgtcttgctttggtttgcaatgctattcgacgaatttcggtgta

SEQ ID NO: 853 - DNA, 247 bp, Setaria italica
  source 1..247: mol_type = genomic DNA
tcgtgatcggcttgcaggtatcggttgtgtcgtcaatctgtggatgacatctgtcgcggtgtcgaaaactcttttgatattgcctcttgggctgtttgttatgttggtgtttgcttcaccgtagcttgttgaactgctttaataccatgttgtaatggaatcagtatctcggttaattactgttggttccatctcgtgctactctcgcttaatcagtacttgcattttacgttacgtcccgcgtcct

SEQ ID NO: 854 - DNA, 96 bp, Setaria italica
  source 1..96: mol_type = genomic DNA
actattccggccatcattcttcatcatactagtaaaagaagatcataggtcttttgttgtttccagcttcaagtggcaatcataccacttgggctt

SEQ ID NO: 855 - DNA, 487 bp, Setaria italica
  source 1..487: mol_type = genomic DNA
agatgatccatgtgcccagaaactacatttcagtgttcgtctactagtgaatctgccaatgtgctatgggttcttgtttcgttggtataggctgtattgttgcttgtgatagctggaaattggagactcccatttgtgtcgtgctagaaaggcttgcgagtagcttgctggttggcaggtgttgtcaagctacacttggttgagggagggagcctttatttatttggattattggtgttactttgtatttgtaggttgagtcctgttgctcgtctccatgttcgtctcttttctattgttgattttgatgtatttccgtaaatgcgcatgatgctctgaactgaattagtttttgccgtctgattgtgatgctggatgttgggagtgaccttcgccctctgtaacctgcaaccacttcctttctcctaggacggcaacaaattttcttttaaaaagacgaatacaagtcttgaagctattgtctgaa

SEQ ID NO: 856 - DNA, 180 bp, Setaria italica
  source 1..180: mol_type = genomic DNA
tggggctcatcgtggatgacgacgacaatggtgctggcaacctttatgtatgatgtatggctgtatgcatgatgctagtctggttcttgctatgtttaagggtcattttaggttatgactttcttttccttaagtgtcacttcatttggtggtcatcaataatgagcacttctagcattt

SEQ ID NO: 857 - DNA, 257 bp, Setaria italica
  source 1..257: mol_type = genomic DNA
gctactggagctaactcagctggcttcagcctgcgtgtcattttgttttggaccatggtgtaacattgcaaagtaatggatctatgggcttgagataggcttgtcatcgagttttgctagatgagtcgtgaataagctttgacttcctcgctgctgagtgaagtgaccggaatttgaaaaattggagctaataaactcccatggatgtgtatgatattttattttgcagttgagcatctctgtttctgttgcaaaca

SEQ ID NO: 858 - DNA, 284 bp, Setaria italica
  source 1..284: mol_type = genomic DNA
cgctctagctagatttagttcatgatgaggagaaaaagcaaggcacaaattttcgtgtaaggtggtcggcagctaaatggacttggcgacctctgatactgtctcacttaagaacttagaaatggttcacatgatacaactgttttttaccttgcggattatttggttcggagagttgaagatgagggaaaagattatgtgacttgcgcgatgtcctgacctactgttttccttactgacttccatctcttggtttaaggattcaccagaattctgatttggcc

SEQ ID NO: 859 - DNA, 227 bp, Setaria italica
  source 1..227: mol_type = genomic DNA
gtcatctcatctggaagcatgcttattttccttaggtatcagtcaactaagactaagagtgcttggatggcattgttgtcctgccatttctttccctgtttgttattgcattgcaactgttcatggttggcagagtaaaagtgtaaagttggttgaactggtacgatggcttcatataaaataaaatctatatctgtaataagtatttagttattagtttggtacca

SEQ ID NO: 860 - DNA, 233 bp, Setaria italica
  source 1..233: mol_type = genomic DNA
tgtgccaagagaattatttgttagttctagtaaatgtttctttacccacttcctgttaagaaaggtgtcattagtgggtggagaaaagcaataagcttattatgttcccccgcaaaacgaataaatctgggaactgtggatgttcccttttttggtatcctagaagtatgtaaatgtattgttagattgtcatctttctgattggatgtctatagactactttaattcttgct

SEQ ID NO: 861 - DNA, 135 bp, Setaria italica
  unsure 129: note = unsure at all n locations
  source 1..135: mol_type = genomic DNA
gcgctgtagcaagatttggttgacggtggcggcaaatttgttgtttcgctatgtgcgagtatgcgagtagtactgttggggtcctaagttttcccgcgtattatgtggtactttcggttataaaaatanaatatt

SEQ ID NO: 862 - DNA, 659 bp, Setaria italica
  source 1..659: mol_type = genomic DNA
tgatacacctcactgattgactgattatgttcccacatcgcgatcttgtacatttatttcttttctgatacataccacaccacatcaaaagatgacctctgtaaaatgtatcacatttcaagccaaaaggcatgacaccaggtataacaaaacaccatctgccccaagtacgactaaatttgtggttgtaggaccagctagaagtaaaatttggtgggagaaatctcaggacggctggcccggcccctccgcctcagctcagcggcatgtctttcgtgctgaatgcaaagaaacacaagtcaagtactgtgaactgatggatgaacattggttgtattgaagggatcagaaggactcgcccatggattgaagggcccacatcccaattttttaccgagcaaatgcacgagacatttcgtgggtgaatgaccatggactactatgccataaatgatttgcacaagcaccttgacttttgggcactagtgggcatgattgctaccaactagcacaaagggtctagtggctagtggccaccccgttaaaacccgtcactacaatgcatttgtgctggcgagtgtttatgtcaccacaaatgcatttcaatttatattgatgggagggctaaatgtttctaactagccaaaaacttaatcgta

SEQ ID NO: 863 - DNA, 241 bp, Setaria italica
  source 1..241: mol_type = genomic DNA
ggagcgtggagcatgcggctcttgtatttgaatttggaaaaaaacaatgtggaattataaaagtgtatgttgatttgagttgagcgtggggttaggtttgtaaacatacaagaacgaaatttggtggttggttggttggagatgtatgtagctgacatgtatgtgttggagcttcgataggaagcaaaaaagtaaacctgatgttgattctttgcgttgggtcgggttaatttggcgttag

SEQ ID NO: 864 - DNA, 389 bp, Setaria italica
  source 1..389: mol_type = genomic DNA
aaagtgcgctgactatcaaaaagaaataatggactttaggacctgatgtgtggcttatgtgaacccttgttcctgtttactatttcgtgctctgaagttggttaaatgattacactaggtgcaattcaggggctaccgaattttgcctggtggtggttttgaagagtgcaaagttgcgtgcatcttctctcgtgagaagaacagaacaaaatttgagcgcattactttagatccctatctattgcaatgtgtacagaagtaccagttgattatcgaaaaattggttgccaatgactatctagattggtttatgtgttcggttatcaattgttgaaaacttgcagagactctttgagagaactagaccaaaggacaacacaggggatagg

SEQ ID NO: 865 - DNA, 264 bp, Setaria italica
  source 1..264: mol_type = genomic DNA
ggttgcttggcctttcggcaggtgcctagtttgccacttgacccagtttcgtctatctgcaacggagattaccatatgttccatgcgtgaaatagtgttcagcatccaggaatatgccaatctcgtttcttcttaaagctgtcttggattgtacaaatgctttgcattgcagttctagttatgtgtactgttttgcgataagcatgatctatctgcagataaaaagaagaattttgacatgtgccggcttgagcatcagttcat

SEQ ID NO: 866 - DNA, 312 bp, Setaria italica
  source 1..312: mol_type = genomic DNA
gtgccaggaactgtgaagcagctagccactaccccatggagtatatatcagtagttcagcttatttagggagctcacgcctttgatttttctttgtgccatttgtatctttgtccatctgagtgttgtgtatgtcctttcggctgacattgcgttaagtctacaactactattgttgggtgaggaataaacatgttggggctggctactagggctggagccagctcggctcggtctggctagctagcctaactagccagctcagctcggctcgttaaccaaatgagaaaaattgttggatcggaatggctag

SEQ ID NO: 867 - DNA, 464 bp, Setaria italica
  source 1..464: mol_type = genomic DNA
agctaagttttcattttgttttcaccttcatcttcgtggaccaatgtgaacttggtacattcttgcttgctcctcgtcagccgttcgacatgtaagagatcaatgctttatagagctactggaaattgtttgaataactacacaaataattacctgggtcataaactaaaccctaaagggcactagagcctatgtccggacctggtgcagtggtaaaactctccacttgtggctcagaggtcctggttccaaccaacctctttgcagaattttaaacaattttgcaagggtaaggctctctagttgcagaattttaaaagaattttgcaagggtaaggttatctagaaattcacttcccctgaccccaccttgtgtgggagctttcgcactggatacgccctttacttgggagcttttgtaccagcaggacctgctttactgagcaagggtgtgaattttgttt

SEQ ID NO: 868 - DNA, 262 bp, Setaria italica
  source 1..262: mol_type = genomic DNA
aataaataccgccgccctcctccctccttaaaccctcctctctctctcttcctccggcggcctgcttctgcgatctgtgctgcggatctgcagaggctccgcgatcgggcgcagaccagcgggaccagttgacggttgcacttacctagagagaactgtttaggctttgggtcggatgtttatggaagagtttgcttgttacttctgtctatgttaaccaaccacaactcatgagtataacaggtcaacatagacagaagta

SEQ ID NO: 869 - DNA, 230 bp, Setaria italica
  source 1..230: mol_type = genomic DNA
ggttgcatttacctggagattgaactgtttaggctttggattggatgtttatggaaagagtttgcttgtttcttatgtctatgttgacatgatataccctcgtgaactggttgaagtttgtgctatgttgagaattttgggctatcctgtgttccttgcatttgtatctttcgtaatctggttctgtttgcgtatttggctgaaaatgtgaatcaatcggactactagtg

SEQ ID NO: 870 - DNA, 252 bp, Setaria italica
  source 1..252: mol_type = genomic DNA
gccactcattgctcctgctgtccacctgggatacatgtggtctattgctgagtgttctgaagcttagttgcgatacatacataggcatttcagttatctgtggttttattttatccccgaattcttgaggtgttactttctacttggttgtctgtctctggaatccctttaaacttaagtggatggtgtaattctggtttactcatcaatgtgaattgcaatatatatagattcgttgcattattcgattct

SEQ ID NO: 871 - DNA, 81 bp, Setaria italica
  source 1..81: mol_type = genomic DNA
ccaatgatatgatggagaagaagattcagacgtgtggtttaggattagctgcagtgcaatgaattccttctcccttcctca

SEQ ID NO: 872 - DNA, 290 bp, Setaria italica
  source 1..290: mol_type = genomic DNA
tgagagggttaagtaacggggagggcgcagggcatgaaggtgctgctgcagtcttcttccttttttccccctttttatgagaacagatatggtggagcgcgggtgctgtatagtggcttagtcagatagtttaggtctggctgtctggaaggctttgtatagtaaagccgaatggaatgctccatggctgttctgtgacggcacgctatatgaagttgaaacgttgcttgttacttattgaatatcctttgtggctgtttggtttgtgatgatgagcagatagccttaaa

SEQ ID NO: 873 - DNA, 56 bp, Setaria italica
  source 1..56: mol_type = genomic DNA
gaagcaagaagatgtttaacgctctgtctgtctatcataagccataataaaccccc

SEQ ID NO: 874 - DNA, 390 bp, Setaria italica
  source 1..390: mol_type = genomic DNA
gatggatccaagctcccgacctggtgcatccgctgatgtttgggagtgatccgagccaatgttcctggatttcgatagctatcccctagtatacgtacctccaacgtcgtcatcactggacgatgctgcattgttgctgtttaattacgtaccttagatgtttgttgttgcacgcttttgtttctgttttaagtccgataaaatgatggctggatgctggttttcatgctccaatctggccaccatggggaaaaacctgctctcatgttgcagtgttgttagaatgattgcatatgttacttgacgtatggagtatttgacaggcctgctgccaagtagtattttgttcagacgagggtaggaacacacaatacttgcaaagccatctca

SEQ ID NO: 875 - DNA, 264 bp, Setaria italica
  source 1..264: mol_type = genomic DNA
ggatgcatcctgttggatagctgactgttttcatgtatcagattctgggtatcttgcttgaatatttgtcacacctactatgtattctagaaatcaaaatcaatagtttcaatgcagaacctggtgtttaggccacgattgcaaacaatcatgaaaaatgtcgaattttgctcgctaagttgtgatatattcactacattatctgcctatgatggtgcgttttcatcatttcattttttaaaatcactactctacttctgcttt

SEQ ID NO: 876 - DNA, 340 bp, Setaria italica
  source 1..340: mol_type = genomic DNA
agaataaagttgtagggcttaaaaacctctctataagctttggatttctccatggtgctccttggcttccatggggggagcgtctcctaagttgtcaagtctataggtctttgtcatataggttttgcagtagctgcaagaaggctggaacttggaactggtttatacttgtatgtccgtccagccataaacctcttatggaaacttaatgttatttctagtttaatttgttagcttcaatgctgttcatgtgtctggctgttaaaagtgtttgtgcttgtttgtgtatgtgatgttgtacctgttatctggtgtctgaatcaagtgtttcttgagtgaa

SEQ ID NO: 877 - DNA, 256 bp, Setaria italica
  source 1..256: mol_type = genomic DNA
gcccatttatttgttatagaactgtggaaggagatgtctactttttgggtccagttctaactagtcaatacttctggaactcatcaatgttagttttgatactgggtgtactggttattttctgtgctatgttgaaagagtttggccatgataacgggaggtttgcctgcatcaagtgcaacattgcaatgcattcatgtgcatcatatacccttccggtaaacttgatatacgtattcattcaccctgtcatgca

SEQ ID NO: 878 - DNA, 271 bp, Setaria italica
  source 1..271: mol_type = genomic DNA
gtttctgagtgaaatttgacgtccaagaggttgccggcttgtcagtccgttgcctcgaagcaatacagaaagggcagaggcagagtataagtggacagaaatacagtagccgtgtacctaggtcgtgataatgaattaagcatcaacacattatattctgtggtgtttcatgccgtttggagtggattgttcgtgtatttggtgtactgtttagttcgcggtttattggttccggctgatgcctatgtggctatgcgagcctaagataata

SEQ ID NO: 879 - DNA, 164 bp, Setaria italica
  source 1..164: mol_type = genomic DNA
gtcgctgtgtccattgcgtctaaaaccagtgccgtagacagtattgaagtttgttatggaatatatgtttatgcagtactctgtcgtactgttatgcaaattttgtgtctgaagtgaacaagagtggttttgtgatgcactaatgtttttcaccttgcacttga

SEQ ID NO: 880 - DNA, 237 bp, Setaria italica
  source 1..237: mol_type = genomic DNA
atgatgccggagaagccaaatttttgtaacagtgtttagggggcttatgaatgactcttgggggccggcggtgacggagactaatcttcttcctctgaatgggtgtatcgctgctcttttagctgctgagtgtagaactctggttttttttttttaaacttccttgtgatttttcttgttattatagcggattcgcatcggaatttatgtgaagaaaagaagatgcttcgggattta

SEQ ID NO: 881 - DNA, 280 bp, Setaria italica; identical to SEQ ID NO: 268
  source 1..280: mol_type = genomic DNA

SEQ ID NO: 882 - DNA, 146 bp, Setaria italica
  source 1..146: mol_type = genomic DNA
agatgtcctggatctctatttcatttctttgaagcaggatgttttggttggggtctcaactagtttgctccctctgtacttcaaaaccatagttttgatgccaaagttgttgcttaggtgttcggtacctggaaattggcagtgaa

SEQ ID NO: 883 - DNA, 472 bp, Setaria italica
  source 1..472: mol_type = genomic DNA
tagcctggtaaaccttgatggatggttcggcatgtttttcctgtgctgctcgaagccgtgcgcttgctcctccatggattccctgactccgagcttcatgtagtaggctggtagtggtcggattattagccccattgctttagttggcactgggtccatttggactgatgctattgaagtcgtctttcttgttttgctgttgcaatttgttgctattgtgttctgttccgcgttctttctttcaatcgttcaatgctctcgttttgctttggcaaacacgtctggtcgtcctgatcacgtgatttcgtcaccaaagccagccgttttgttctctatcgaccaagcttagagatgcccttttcccaggcaaatcattcgaatggtgttagtaaacccttaattgtttagcgtaacactgagcaaccattccagtcaaaaacattgtaactgtaacttgatcttgctgctaaat

SEQ ID NO: 884 - DNA, 443 bp, Setaria italica
  source 1..443: mol_type = genomic DNA
tcttcggagcgggcatgttgttcgagcccattgttttagatgctcaatgctgtcgaagctgtgccgtgccattattgtagcttatttcctctcccctcactcctttttccttgtattagtaggctggtagtggtcgaattagttccccattgctttgtgttgccgctagttggcactaggtccgtgtggactggtattgttccctgttgcggtcttagcacgtcaagaccgcgatgggatcagattcactcgtgtgctcgactgggtcagagaagaattgggagaaacgaaaagggaaggaagaacagcgaagaacgaggaacagaaaaagagggaacagacagcatagccgtgattgatcttcgtttattccttgtctgtgtaatgcttacacctttatacgcgtttttacaacagcctttgggtccctacccttaacttaa

SEQ ID NO: 885 - DNA, 433 bp, Setaria italica
  source 1..433: mol_type = genomic DNA
cccttagatgtcctgtgctgtcaaagttgtgcgctgcgccattattgtagctgctatcgtctaccccgctcgcttcttttcctatagtaggctggtagaggtcgaattagttctcattgctttgcattgccgctagttggcactaggcccatgtggactggtattgttctcctggatttgacaagcatgtgtgtggtcggtctagcgttttattgagcaatatcagtccacatgggcctagtgccaactagcggcaatgcaaagcaatgagaactaattcgacctctaccagcctactataggaaaagaagcgagcggggtagacgatagcagctacaataatggcgcagcgcacaactttgacagcacaggacatctaagggttactgtccctcgccagcatcgcctttcggggcttctttgccctcctcag

SEQ ID NO: 886 - DNA, 259 bp, Setaria italica
  source 1..259: mol_type = genomic DNA
ttcttcggcaattctttgggcccaagaaatgcaagctgagaggagccattatcgccagcctccttccccatttctttctctttttgttactgtttcttcattagcgtggacaaagtttccggccagtctatctgcgatcgttttcttctattcatcaagactgtaatatctattgctacctatgcttctcacttgtgattttggacacatatgttcggtttattcaattttaatgagatgcctgatgaggctactagca

SEQ ID NO: 887 - DNA, 270 bp, Setaria italica
  source 1..270: mol_type = genomic DNA
cttccctaaagaaggccggcttttgaagagggaacagttgtatctgaaaattgaaatcgaaaaagacgtgtatcgcgacgaaagattggtaccgagacattcgccctagcttgagctggcttttgctgtagtaaactcaagtgcagtgattgctgggtgtggcatcgtatctggatcattatctgtggttacatttgggaccctgtattttctatggttttatgccctctgcttagtatcaataaattggtttggaatggttgaatttaa

SEQ ID NO: 888 - DNA, 396 bp, Setaria italica; identical to SEQ ID NO: 269
  source 1..396: mol_type = genomic DNA

SEQ ID NO: 889 - DNA, 465 bp, Setaria italica
  source 1..465: mol_type = genomic DNA
aggagctgatcaaccccgaagtgacagtgacaatgaccgagaacactcctgatgatcctcgccagaggaagccagacatcacaaaggccaaggaagttcttggatgggagcccaaggtcgtcctgcgcgatggcttggtgttcatggaggacgacttccgggagcgccttgccgtgcccaagaaggcataaacccaccctgcttttgggggaaggatatccacgggaggagcatactcatagttgggttcgtcattattcgtggccaccatttcattacggaatttgagttccaataaaccgaatacaccctttgtcgttcaccttgaaagattgtatcattagaattcccatacagggccggccgttttgcgtctctctgcttccgcagatcttgtggtacttgtgtttgtagcctatgcactccctgaatcgattatagcaatgttgccattttgagctttta

SEQ ID NO: 890 - DNA, 290 bp, Setaria italica
  source 1..290: mol_type = genomic DNA
gctcaagggctcacttcgtcttcattctctgtatccgttccgttccgttccttgattctgtttcatgtaaggtactatgtttgagactgccagcctttgagcaggcagtgttgttggatttattattttgtggctcgctacaatgcatgcattgctgcagctcctttccatgccaagtttgttgctagtggtgaaaacaacaaaaagaggttggaagttatcagagtacctaggatcatttattttggctgtatgcgagacacattattggtttttctttgtacatccat

SEQ ID NO: 891 - DNA, 246 bp, Setaria italica
  source 1..246: mol_type = genomic DNA
gtttctcaactgcatcatcactgtcatctagtctcacgttatgtctggttcatttatttagagatgtgctgcagaacagcatactatgtctattttcttcagaccatgattcttctctgggataggccccctgtatgctgtggcttcatgtgcgagcgtgttgtgttgtatcacctggtttgttgtaaaacttgcttggcttggcttggttggagctgtaagctgatagttctataaattgcttgg

SEQ ID NO: 892 - DNA, 264 bp, Setaria italica
  source 1..264: mol_type = genomic DNA
agacggatttacgtgccctagaaactagtcgctagtgtttgctgctgtctaatgacactatgcaatgtgatctggaccctggtttctttggtgcgacgctgtagccgtgctatgattattgtcgggaaaatctgtgggctccccatatgagatgttgccgggcaaggcctcgggtgcgtcccacttgttggtgggggtcactggagccaggtttggttgggttgggaagcccttttaaaactgttggtgttactttgtatttta

SEQ ID NO: 893 - DNA, 262 bp, Setaria italica
  source 1..262: mol_type = genomic DNA
gtcttgccgtgatccttgtgaagttgataaaaaaatactaggacgtcgaactgggcttgtcttaaacttagatatgtacccatcagttttgtgcctgtcaatgagaatgtcgaagtatctggtccaatctagtgtttcctttaatagaacatgtggaggaatgccttttgggattatgcagtcgcagcttgtgttatggttcttttgccacccctttgtctcttattagctgctctgcagtcttgatatcattggctattgg

SEQ ID NO: 894 - DNA, 431 bp, Setaria italica
  unsure 298: note = unsure at all n locations
  source 1..431: mol_type = genomic DNA
tagccatcgatccaagtgactgccatctctatctcttaaccctttgggtagtcgtgatgcttgtacaaggaccattttcgttgtgtcctttatcatcgggtctgcttacctttccttttgttatattgctatattgttatccccatgtattgctttactttcctcctggaaccctgttagtgtgtgggggagaataacctaagcctgccttttaactagtacaaggattgtcaactcttatgtactatgattgaatggttatgcatgttccatatatatccagcaaatcctaatgatngrcttaggttgtggatttttagctgtgtgattacaatcatcaccctttttgatcttggatgagatggatcacagctggagccaacattattgtaataatgggtacgaaatgggcgatgaaattggagttcaaa

SEQ ID NO: 895 - DNA, 390 bp, Setaria italica
  source 1..390: mol_type = genomic DNA
aggtgcattgccactgttggttatttatctggtcgtctatttgggaggtggtgtgttgttgatgatataggcgtgtttggttatgagtaacatgcttctggactgccgttttgtcttgcggtttatgcggagtgatttggatgtacctttactatctgtaatgttcttttgaacaagtagctttgctacgtcttgatcgcgatcatttacgtcagatgataagtgagcttacatcagatgataagtgggctgttcggaagtttgtgtagtcattttcccagtgtcgccgattcgcagctggtgagttgtgacgcagagttccggggctcggtgctacgagtgcagcgtctaaacaacagatattcttactttctgcttttcaagttttaa

SEQ ID NO: 896 - DNA, 441 bp, Setaria italica
  source 1..441: mol_type = genomic DNA
accgcgccgccaaataaaaagcttaaatactgagactcttcagctcctgcatgggcaaccatgaagtgtctgttcgtttttttttttgcttcgtgtcaccttgattttgtttttttttccttgcttgcttctgctgtatccatggcatgcatgcggatctctccccccaaccggagagttatctacataggactagctactatacaactatcgatcgttgggtgaggaacatgtgaatgctagctccggctatgatatgtaatatggatactagagcataccctgccaatccgccgacaatactagatcatggttaattactggtgtttttgtctaatttttgtgtatctttgctcaaacttacgcttctacgtaaatcaaatgtcatgtatcagatcagttgaggaaataaaggcttacaatacctgtcctttttaatta

SEQ ID NO: 897 - DNA, 388 bp, Setaria italica
  source 1..388: mol_type = genomic DNA
accggcggcgccaaataagcttatcgcgcggaccgctcgctcgtgagcgaccgtggatgaagtgtctactcggttttggcaacttaattatttgacgctctgtttaaagtcgcctgcttgttaattccctttcttttcgtgtttccgtcctgtgtgtatgtacgaatgtacatgtatcaacgtaggctgaggagcatgcatatgtgaatgctagcgccggctaaacttatacgcatacacatcgtaatatattgtatacgcaattcctccactgcctcatctgtttcttgacgtataattatatatctatgtactatcggcttgtttggttggatgtaattggtgggtgggaaaaaagaagttttaagaattagacgaagtaatttaa

SEQ ID NO: 898 - DNA, 247 bp, Setaria italica
  source 1..247: mol_type = genomic DNA
gaagtgagttagtttgtatcttgatgaatgaaagcagtgttttagtatgattgattgcccttgtccttgtggttattttagcactttctgttcatccttggttgatttatctgtaaaatagaaccggaattgggttcctttgtcatatacagtacggttatgaaaacaggaagaattaaccagtgtcactgtgaatagtgatctggataagttcattttgttgagtgaatgacccagagagaaggaa

SEQ ID NO: 899 - DNA, 231 bp, Setaria italica
  source 1..231: mol_type = genomic DNA
tcgtcactcgtcacttagccttattccgggtcctggaaatgcgttggttttgatgacttgtctatgggtgtatctactctactatagctcgcggttttttgtgcatgcatatatacatatcctgtaacaatgtggagccaatcgggcactgtatgaagtatgtagtttgttttgaggtattgattgaattattcgattcaatgggtacttggatgcctaagaaaaaaaaaa

SEQ ID NO: 900 - DNA, 157 bp, Setaria italica
  source 1..157: mol_type = genomic DNA
tcctaagcagatgccacccgtgcaaaatagaaattttgatggttaggccgtacgctgtctttcatttgctcttgtttggaattggtggaagcttttgaactgtaatttggtgcaaaacgctacgaaaaaaataagatgagttgcttagaacttaaaa

SEQ ID NO: 901 - DNA, 373 bp, Setaria italica
  source 1..373: mol_type = genomic DNA
ttttatattttgcttactactagtaaccttgaaggaaaacaaaaacaagagaactgcagaacgagggctgcactgcactcctgcgctcaccttctatcatcatataatatgatcatcttccggtgcagtgttacagctgctgttagtggagggcctttgcttgttctgatgacgcagcccatagctgctcgatcggttttccagtaatttcagtactattctaatgctctgtttttcctttcctttccttttcttttcttttcttttctcttcttttgttgccccttctgccttcctctcttctatgctgtaaatgggaggatggtactgctgaggattaaaaaaagatttctgaagaaaatatcatgctgct

SEQ ID NO: 902 - DNA, 201 bp, Setaria italica
  source 1..201: mol_type = genomic DNA
gcgcgatgctacggtaaccaggccatgttgaagtgatgttgctagggatgtgatgaggaagtactatttttttttctgtttgttttctctttgatgagctaatttttgagttcgtaatattaatctgtagcatttttctacggaaaaaaaaatctcgagagtggatcattggaataaaaataaattgcatttcagtggtta

SEQ ID NO: 903 - DNA, 308 bp, Setaria italica
  source 1..308: mol_type = genomic DNA
gtccctctccttcctgttcgtccagccttgcgaccttgctttttgttggtttcgttacatgccctcactgttgttaatgttaaactcacatggtacatggccttgtagatctgttcagtctgttctcggatatggttttgtgcattaaaatgatcatatgatcgatcttcgtgaggcgaaaaaaatcagactgcctacttaatggctagcaaaatttcattatgatttgagtcagttttcattacaaatgcaaggaagccacgtaatgagctataaatgtgccaaataaaaattgaatgttttcttta

SEQ ID NO: 904 - DNA, 218 bp, Setaria italica
  source 1..218: mol_type = genomic DNA
gccatcgagcgtgtttggccgtggtttacttactcaggtatttgagttccgtagttgtagggagacgaggaacaagtcagatgcaatttggtttttaccataagtgtgctaggaggaatcagccatgatagcttgcaatgcaaagatatcgaatgtaattaggacggcaagcgcggttcatagagtcagcacagggaagcagagtaaaagtcaatttg

SEQ ID NO: 905 - DNA, 144 bp, Setaria italica
  source 1..144: mol_type = genomic DNA
aggtggccgcgtttgccttcttctgatgcttggatcgaatccagtgttcaaagtggtgcccaggcaattcatgtatcaatagcaatttgaattttgtagtaggacggaacctttttgtgagtaccataattcgaccgagattag

SEQ ID NO: 906 - DNA, 271 bp, Setaria italica
  source 1..271: mol_type = genomic DNA
taaagcatcttgttttcctcaagaaatacattgacagatttttttcgtgcatgataaactttgtggtcattccctggtggaacagcagggtgaatccaagatgacattgttgttggatgtaggaacacttgattaatcagatatgtcatgtgatactgcaaaccttgcccacgttgttggttgctgtgcataggatgattaatgcaaccagaattttttaccatccttacgaacggtcaatattcaaatgccaattttagaaatgctacct

SEQ ID NO: 907 - DNA, 270 bp, Setaria italica
  source 1..270: mol_type = genomic DNA
gtttctcaactgcatcatcactgtcatctagtctcacgttatgtctggttcatttatttagagatgtgctgcagaacagcatactatgtctattttcttcagaccatgattcttctctgggataggccccctgtatgctgtggcttcatgtgcgagcgtgttgtgttgtatcacctggtttgttgtaaaacttgcttggcttggcttggttggagctgtaagctgatagtcccaagcaatttatagaactatcagcttacagctccaacc

SEQ ID NO: 908 - DNA, 327 bp, Setaria italica
  source 1..327: mol_type = genomic DNA
gctcaagggctcacttcgtcttcattctctgtatccgttccgttccgttccttgattctgtttcatgtaaggtactatgtttgagactgccagcctttgagcaggcagtgttgttggatttattattttgtggctcgctacaatgcatgcattgctgcagctcctttccatgccaagtttgttgctagtggtgaaaacaacaaaaagaggttggaagttatcagagtacctaggatcatttattttggctgtatgcgagacacattattggtttttctttgtacatccatctctgagatatgcaattcctttgatcgattgctattc

SEQ ID NO: 909 - DNA, 346 bp, Setaria italica
  source 1..346: mol_type = genomic DNA
gtttctgagtgaaatttgacgtccaagaggttgccggcttgtcagtccgttgcctcgaagcaatacagaaagggcagaggcagagtataagtggacagaaatacagtagccgtgtacctaggtcgtgataatgaattaagcatcaacacattatattctgtggtgtttcatgccgtttggagtggattgttcgtgtatttggtgtactgtttagttcgcggtttattggttccggctgatgcctatgtggctatgcgagcctaagataataatacaggatgaagcaaacctgtgccttttctctcgttccttttcccggaagaccctcgttgtgcccaaaaaaaaa

SEQ ID NO: 910 - DNA, 348 bp, Setaria italica
  source 1..348: mol_type = genomic DNA
ttcttcggcaattctttgggcccaagaaatgcaagctgagaggagccattatcgccagcctccttccccatttctttctctttttgttactgtttcttcattagcgtggacaaagtttccggccagtctatctgcgatcgttttcttctattcatcaagactgtaatatctattgctacctatgcttctcacttgtgattttggacacatatgttcggtttattcaattttaatgagatgcctgatgaggctactagcaaatacatatggtgttctgattgtcattggttattgatgtcttatgaaatgaatgaataatatcaaaatttgagctctagtaaaaaaaaa

SEQ ID NO: 911 - DNA, 389 bp, Setaria italica
  source 1..389: mol_type = genomic DNA
gccctggattcaccgtctttctgctttattggggctgttcttttgttcgagtccttgccatgtaagctactgtgtttgagatttctggggttccattgagctatattgccggatttgttggttgggtcaaaaccatgtaccttttagactctgttcagtggctgctatattcaaccagtgctgaatcatacattgtgtgttcaagtatcgctttgatggcaaatttggtgccaatgttaaagagtattgaactatctactagcatgttctgtaatagtttttgaatgactcattatcatttctcttgtacattcattctggttatgacctagcggtggtgtcgcccagttagtgttgcccagttaattcatgatttctgatgtaggtaa

SEQ ID NO: 912 - DNA, 471 bp, Setaria italica
  source 1..471: mol_type = genomic DNA
gttcagctgccgttttcgtgtagtctcctatgtgtgggttttttcatggggggagagaagattgcaggttatgtttgtgttctgcagacggtccttatttcggccacttgtatctgtggttgccccagttacctttgtactcctactatttcgtcgccctgtgacagtgaggtcacctcgtggaacttatggttggcttgatcggttgaaactgttatagctgatagttctataagtttttttgtgggtagaggattatgtggatttttaaaatttattatttttgtgtgccagtgcctacgatgccttgggtggttgttggctcagttcaaatctatggtgctaaagtagcagctctgttgttctccgagaatcatttggaagtgcaactgtggtgatgatcatcaattcgtggtgacattatatgctgcaactgcaagtatcattcgtggtggttgccgagttgaaacc

SEQ ID NO: 913 - DNA, 178 bp, Setaria italica
  source 1..178: mol_type = genomic DNA
gctggtactgcggtagtgtaaatgcaagtcctcgtctgccatccaggacttcataggcttctctcttgagtttttgctatagatgagcggtgaataaatttgccttgcgtggacaagagagttatgcagggaacaaacgtaaatgctatggatgtgctctattttgccgtatgctaaa

SEQ ID NO: 914 - DNA, 334 bp, Setaria italica
  source 1..334: mol_type = genomic DNA
agcgggtgaaatgaaaatccacaagaagagaataaatgaacaatgatctagaatccacaatggcttttagttttacagcctagaattttttgtgtcgacagtaggaagatgctccagacgagctgcaattgtggctgttgttagcttctaatggatacgtacgtgggtgctggatgccccccaagttatctttttctgaaccaggccctgcttaacacaacacataaattttgctccttttccattgtggttgtgtctgtactctgtaggttgttggagtttacaaactaccagagagctaataaagcatttttacgaaagaaatgtgtaacca

SEQ ID NO: 915 - DNA, 540 bp, Setaria italica
  source 1..540: mol_type = genomic DNA
gatacagatcaccctggttatcaggtatcctgtgagctagacgtcgggtcaaatcctgctggaagaagcagagagttgcaaaagactgcataagagatgcttatctctctattgccatctacatggtgaacttaaagataagctgctgagtttgcaccatttccattggctattgctacaagttagcatctagtttcaagatatgcaacaaagcagctttagacacctgggagcacgtagattatgatgtccaacttgggctttgaagccatggcactttctctaggcagccatgcttcattacgagcgcccatagtgttgttagaatagattaagatctcaagttttcatgacttaatcatgccagcgtcttgttgtagtggaatggaaccgtattcttgttttactggttgaggaatcctaataattttggattgtagattgtagggaaatcatgtgcgtgtcaaacactgcaagtgtgagttttagccagaaagaaattagagtttgcggattggaatgcaatgctctagcaatacc

SEQ ID NO: 916 - DNA, 265 bp, Setaria italica
  source 1..265: mol_type = genomic DNA
tgagttatctcttgggcatcctttgttcaagctagatatttagttctgacagggggtgaaatcaatattatgggctagggcattatttggttacaaatccttttatacgggttacttccatggcaatttttgtaggtgtagacttgcccgccacttccattttaatgttggatggggtagtggccttatcaataaagcatgaagatcgaatgcatcaaaaaagttatgatatccctctataagaaaaagctactgcgccacccac

SEQ ID NO: 917 - DNA, 384 bp, Setaria italica
  source 1..384: mol_type = genomic DNA
tgcaccacatcacatgatgaatggatggctattttcctttgcccccataaattggtgagactttgcaaggaaggttcgactccaaggtagaaggcacaccttgctgcttctgttggagtaaagccatcgccatacctatttatgtagtgctggtttggcttttgttaacttgttagattgtgtagtgcatctgttgttgtgtgtctgtattgtggtttatggtatcaacttactggtgcaagtcacctagtatttctcaaataatgataataaatatgtaacccgaatatctgataataattatgtaattgagatccgggctgcattgtttcaaaaaaaaaagtaaaaaaaaaaaaaaaaacttaaaagaagaactagccaagg

SEQ ID NO: 918 - DNA, 275 bp, Setaria italica
  source 1..275: mol_type = genomic DNA
gtatcacaagagcgccggccgtggacaaacataataaatcagccatcatctgttgttttacttcaagaagaaatagtgacgtttaattcaacagacatgtacttagacatacaatgtacagtcctttgactcaagtttaagagattcaagagccaagctcgacaaagagcacagctttacaattgaacctggaatggaatgcatccattcctttggctttaggacgattacatgtatcagaaatagagatcttgaaggagtgacatctttcgcgt

SEQ ID NO: 919 - DNA, 273 bp, Setaria italica
  source 1..273: mol_type = genomic DNA
agctctgcaccggatgcccttttgttgtgattccagatttccagtatagtagagagtagaggtctaattttttattctttcaagcgtcgagattaataattctttcatacgtagacagagtattccattatgtacatatcaacaagataggggaatttgggcagctactaatgttgttccgagattttatccaactgtatattgccgaatgggtcccgttcaattgatcaaatatatatcattctgttatattctatttcttgtaaaaaaaaa

SEQ ID NO: 920 - DNA, 185 bp, Setaria italica
  source 1..185: mol_type = genomic DNA
taggcaaaactaactgtttgcctgattttacagacaactttgattttgtagtgcagcattcatcagcacttaaacatttttgaaaactagaataattatggagctagtacacgagatagctgacctctttgtaaacattctttatatatcaatgaaaaatggggttaaggttttctgtcttgtaa

SEQ ID NO: 921 - DNA, 374 bp, Setaria italica
  source 1..374: mol_type = genomic DNA
atacgacatgtagctggctgatcgatcgaccgtctataagtgtatctatagaactcagaagaataagtggtgaacgacccacgacagaaagtgatagaagcagcatcacttgcatggccaggttattgaaactgttcacctggtcattttggttggattgtccaagttggttgtgtgtgccaaagggcggcacaccaaaaaaaattcccctcatattagtactagactttcttttctccactagccttgcctgcatatttgtcttgtttcccccagtagtgaacaaaatatcatatctttgtacaacacttttttagggctttttcttttcaaggggaacggtgccctttatctcaggcgatggttacatgttg

SEQ ID NO: 922 - DNA, 177 bp, Setaria italica
  source 1..177: mol_type = genomic DNA
aggcggccaagatgatccagtgaacacctacatagtatatagttgcttgtggtagtgtattgtagtggccagcggcatatatgacctaataagtatgaactatatatatacactatatattgcgagtaaataaaaggatatattagtataatctctgctgctgttctgtgtagacaa

SEQ ID NO: 923 - DNA, 908 bp, Setaria italica
  source 1..908: mol_type = genomic DNA
cattaccgtatcgatacattctgaaggcatcagtttcaggtagaagctggcttttccactgccagggctgatacgacggctacatggtgccccacacaaatctgtaactaggcaattttggtggtctacagactaaaggcttaaaggttgccggattcagatatagggttatatgcaacttggtgatgattaaagcagctgattagtctctttattcatcaatagagaggctggagtagtattttgggctgcagataagctgtacatgctttctgcagcaatctcagcgggtacatgtatgtctgtatgtaggagatataggtgtactgtacatgattctttcagtcctagcaaggactggagcaaagattttgcaatgcaagacgtttattgtaagttacaagaaacagatgaaacacatgcgaactggagattccagcataaaagaattgaacactttgatagattcatagatagggctacaagatgagtgctacgctgcatcagtggattacggttgcttcagagaaaaccatgtggaacatagactgctacagctgctgacaaagagatcccaaggaaccaactccgatgtacgcggcgcatggtcgtaatggaagctggccacctgcgctcgggagcacgaagtccacccgccggtggtggcggtggcagcggctgcgatcccgtcagtgcgggcttctggtttgacacctgcgctggttcatccgcgcgagtcatggtatgccgaaatggcacagaggcttcatcagcttgtaccgcgacgtgtcggcaagttcacaagcggggtgcacgcccgcttcaccctgcgaggcccgacaggcatgctcatcctttcgccactctctgacgaagcgaggaggacaaattatacggttctactcacg

SEQ ID NO: 924 - DNA, 604 bp, Setaria italica
  source 1..604: mol_type = genomic DNA
gaagctttaggtaccagtaccccaatttcccattttcgttgatgcatagagctccccttttccccgtcaaacttgcacaacattaccagcctccagagcattttcaccacctgcataactattccccattgagcctgagcacaatgagctaagactgtcagtgaaagagccccacattccccatcttctgccgccttttttttttaccattcacccgttcatatgccgatcccattcaattcaatactttttttttcatattttgggctcctttcacctcatatgtattttgatactccattttgatttacctctatcatagtccataggccagcaccctgcttctcaagaatggaaaatgtctgtaatgttgtctagatttagcatacatcttttagggaggggggctgggggttgcgattttcgttacatgtaaataccttataggaaaaacatgagagaaatccattggaagattggtttccctggagagacaaagagaaatggtggcatcatattgagatgagattttggtggttggggtcaggtacagggctagtagctattttgagtttccattagagtctttgtctatctatctatg

SEQ ID NO: 925 - DNA, 263 bp, Setaria italica
  source 1..263: mol_type = other DNA
gtggccagatcaccctgttccggtcggccctgtacatcgtcgcccagatgtggaagcccgccgtcgcgggcttccacaccgccagcgcctgccccagcgccaccgccgttaggttgcctccggcgttggtctttccgtcgattgtcatggcggccccgacttggatgaagacgaagaggaaggcgaggcgtcggagccggacttcttccgcggcgtcctcggcgagctcgtcctcaccttcctcttcgtcttcatccaagtcc

SEQ ID NO: 926 - DNA, 383 bp, Setaria italica
  source 1..383: mol_type = other DNA
ggaagtttcataaagactggactaaggtgatcgtgtgaccaacggtacggaggtaacggtaaaagcagctctacttagaacagtcttattggaagtttcataaagagtttcacgggcattaaattctataccacatcaagcaattttgctgacgtggtaagatcattgggatgagagaggagggagagttttcatcagatgcgagaggagtttcatccccatgacactcagttggctcggttacctagtttgcagtcttggtaactgtgcatgaaactatgcactgagactggccttattatttatggttgacatagtaataaattacttagactagtaacaaacaacaattagaataaatttaatttactaacttaggacga

SEQ ID NO: 927 - DNA, 407 bp, Setaria italica
  source 1..407: mol_type = other DNA
aaccaaagaaggtaatagacctaccaacctacaagaaactaataaacccaccctaacggtggttacccaccgcagggaccccaagaggcggcatgggctgggaccaaaggcagggccctccaccccatccttcatatcagggtggtggttctgactactacaagcagggatctcaaccatacgatagccagccaccaagctaccctcctggaccagggaactttaacagttatgggcaatctcaggctcctggctatggacaacctccgtatccgcaacatgcacctcaacagaactatggccatgggtatggtgatcctagatacaatgctccaccgccgaaccagtattatgggcagccaccaatgggtcctcagcaaggctatcctcagcagccagatccttat

SEQ ID NO: 928 - DNA, 975 bp, Setaria italica
  source 1..975: mol_type = other DNA
ggggtagaggagcacgaactcgccggcggccagcagctcgtagatggacttgtacatcatgggcacgccgccccacagggttgaggaagtcgaagaagtcatggccctccgaccacgccctcttcttatctgggaacagctgcggtgcgcgatgccgcgcacgaccaccccttgaggcgcaggaactccgccgcaagcgagatcagctcgatccccagaagcatgtggttgccgacgagcagcaccgggccgtcctggggtactccggcaagacccctcaccactgtgccgtcttgcaaagtggagtacatggccgggcaggtcctgaatctgagatcacgggtagctttgtctacttccttcagctctgttgcagatggagggatgtagtcgaaaacccggtggtaccgcctcgaatggcggtagagatcggtgcacttgatgatggacgcgacatggacaccgtactccaacagtaagctgtgcccatgcttgtcaaaaaaatagattgtgcattttggtaacaacttctgtagcctgtcagcttcagctttgcttggaagtaacttgtcagcacagctggcaagaagtagaacttcagcttgaactgattgtagacgataattagcataagaggcagcccgtttgatcagcttcattttccatttcatcgtatcctttggtattttgtcaagtatgttcgaatgcttcaggaaagatgacatgttacttgtcaatctgttcagttcttctaagggatgcttcccatttatcatgctacttactgccatgtgcgcttcattgtcaatgttgtagttcaatagagctgtaattgccatacaggcttgatcggagaataggctgaaaaacgatagaagctgctgtatgcttgacttctcatatgatgtcgctggatttactagcaccagtatcaaatcaatatgtggttacgagtcagctactgcaaggcgaggc

SEQ ID NO: 929 - DNA, 288 bp, Setaria italica
  source 1..288: mol_type = other DNA
ttaggttacggttacgggttacgttaccttaatttgtcgtagtctacggtcctacgtttcccgtcttggtaggttggtcgtcgcaagcagatgcaggtgggcgccgtcggcgggaggcaggtctaccggaacgtcctgcacgccatgtactgcatcctcaagaaggagggtgccgctggcctgtaccgcggcctgggtccgagctgcatcaagctcatgccggctgcaggaatctccttcatgtgctatgaggcctgcaagaagatcctcgtcgacaaggaggacgaa

SEQ ID NO: 930 - DNA, 140 bp, Setaria italica
  source 1..140: mol_type = other DNA
ctggtgtggcagccggtagcagcaccagggttgaagttcatctgaggcaggttctgaagtccttcccacattgcaggtatctggttcattgtgggaaggacttcagaacctgcctcagatgaacttcattcggcaagcga

SEQ ID NO: 931 - DNA, 212 bp, Setaria italica
  source 1..212: mol_type = other DNA
ggagaaatcctggccgtccaaaaacagagcaggcaatttgttttcttttcaggtgtatagtacaaaatattcgcacacaaaatagttgccgacgagacaataggcaaggagagaagaaaagaaacggaacagagaggcttggctgcttcacctggtcgtcggcgtccaggggatcgaagagcccggcgtcgtacatggccttcttccccttg

SEQ ID NO: 932 - DNA, 143 bp, Setaria italica
  source 1..143: mol_type = other DNA
aggatgttaaagttaacattcctgcctgatgccatcttcctagattgaatctgtcatttttgcgctcgctgaccgtttagactgttctcaaaatggttcatgtaatgtttgacctgtgcagaacatttcgctgatgtatatag

SEQ ID NO: 933 - DNA, 164 bp, Setaria italica
  source 1..164: mol_type = other DNA
tgctgactacaacatggatggggaagccctggggatagcaaatatgactgaactacgctccctgcagatctttggctgtagcttcaccaaatttggggaagccctggggatagcaaatatgactgaactacgctccctgctagatctttggctgtagcttcacc

SEQ ID NO: 934 - DNA, 106 bp, Setaria italica
  source 1..106: mol_type = other DNA
aggagcaaagttggcttcttcaggtgccatgtcagtcacgacttgtcaacagtacaactactacgcttcagagcaaggctatatttacaaggaagaaagagaggaa

SEQ ID NO: 935 - DNA, 213 bp, Setaria italica
  source 1..213: mol_type = other DNA
actcttcagtcgttttgggagcagaagccctcccagatggtctagtgcaagcatcttgaactctttgggtattacttctccaaacacatgagatgtagaatgttcagtatgtaaattatttactatattattattaggctgaatatgtaacgtaaattattatttgctactccatctatcccaaaatataaggattttgaagtttaaaaaaaa

SEQ ID NO: 936 - DNA, 222 bp, Setaria italica
  source 1..222: mol_type = other DNA
acccatagccatactgcaagttcgatttcatattttcgtgcaccaaactccaaatcataaatatctgtcttttcctagagaaacaacagagaactgtattttttatctgtcttatatttcgtaacttgcttacttgcataaccatgtcctgcatacaacatagacatgatcgttgacaatacgttagaattgaattagtttaggaattagaaatacaaggta

SEQ ID NO: 937 - DNA, 113 bp, Setaria italica
  source 1..113: mol_type = other DNA
ctgcaggtgtccgtcccggtcagcgggatccgatagtcaaactgcatgcacgggaaatgatgaacaatggttctagtttctacttgtcttgtattttgaatgacacgaattcg

SEQ ID NO: 938 - DNA, 250 bp, Setaria italica
  source 1..250: mol_type = other DNA
ttttagttttaatttttagttttacttttaacttttaaagttttaattttagtttaacttttctttatttgttcttacttatttccttttgttaggttctttcttattctagggcggtgttgaaggtgggacacctactgatattgctgaagaccaccactacaggagtggttttgatggtgttgcagaacatggggttctttgggtgaccattgcgacacaaaaggttgggagtttgggtttcactacc

SEQ ID NO: 939 - DNA, 261 bp, Setaria italica
  source 1..261: mol_type = other DNA
aaccgaacaaacgaacaaaaacaaacaaagaagaacccctaaccgaaaataaccgaaaagaaataactaagggaaccggaaccaagaccaataggacgaattaagggtttggctccccgccctcctcctcgccttcctcctcgccgcctcccccttcacccaagttgctagagctcagtcggaggaagatgctgctacagctgaggttgttgaaggggctgatttaggaattgtgggtgatgatactcaggtttccagtga

SEQ ID NO: 940 - DNA, 117 bp, Setaria italica
  source 1..117: mol_type = other DNA
tccgttagtttgtagttctaaatttaagtccgtctaggtcttcctacgtccttggttggttgtccctttccgttctaatttccttttaagttttctagtcctttgtcgtacctatta

SEQ ID NO: 941 - DNA, 203 bp, Setaria italica
  source 1..203: mol_type = other DNA
ccgcaaacatcttatcatcaccggcactcttcctacaacaaccttgggccctatcgcagcagcaatggcagcaaagatatttgctctttttacgctccttgccctttcggtgagcgctgccactgcagtctttcttccgcagggatccctagctgctactgccgctattccacaatacctcccaaggctgtcacatgtgggag

SEQ ID NO: 942 - DNA, 309 bp, Setaria italica
  source 1..309: mol_type = other DNA
ttactaataattattactttacttagggtactaacttgggtaagtaagtaagtttcgtagtcgtctattgtcttgtattgtagcgcggaggagaagtaccccgacaaggtgcgcgccgtggtgaagttcaacgcggcgctggcgcaccacatcatggccggcgccgacctgctcgccgtcaccagccgcttcgagccctgcggcctcatccagctgcaggggatgcgatacggcacgccctgcgtgtgcgcgtccaccggcgggctcgtcgacaccgtcatcgaaggcaagaccggattccacatgggg

SEQ ID NO: 943 - DNA, 165 bp, Setaria italica
  source 1..165: mol_type = other DNA
tagttgttaccttagcccaaaaggtgaaccacttcaaaacgacagtaatactctacatcatgtacatgctgttgggtcatttgatggccgcatgggtcagcactcagcagtcagcacatgatgtagagtattactgtcgctcaaaaggtgaaccacttcaaaacg

SEQ ID NO: 944 - DNA, 193 bp, Setaria italica
  source 1..193: mol_type = other DNA
ttacatgcgccttgtttatgaacttggacatgtttgtctcacaatgttagatcacttttgtgttctgttgatgaacttggacatgtttgtctcacaatgttagatcacttttgtgttctgttgatgtttgagctgactttgcgcaactattaaattcttgacctgatatagatgttttttttaaacctcaaag

SEQ ID NO: 945 - DNA, 148 bp, Setaria italica
  source 1..148: mol_type = other DNA
agaccggtcaagatatgatctaccactggaaaaaaaacaatgtcacgctttaaacaatatattagataacaacttacgactgatgatctgatagcagtatagatggggatcagatcatcagtcgtaagttgtatcagattcacaacaa

SEQ ID NO: 946 - DNA, 150 bp, Setaria italica
  source 1..150: mol_type = other DNA
cctgaagtatggaacctgtggaaaaagcagaccagtacttaagtagtcttcgagagtttctaattgacagaggaaattttgtgttgtgctttggctgtgaatcccttgatgtgttaattaattaaatgtactatgggatgaaaaaaaaaa

SEQ ID NO: 947 - DNA, 162 bp, Setaria italica
  source 1..162: mol_type = other DNA
ttcattacattctgagactgcatcaacgttctcatcagatcctgaatcttttgctcataggagccagcttggtgcctatctctccactggccaaaggaatttctgcattttggaggtcgagcttggtctgactgtcttgaaatggcgcacatacgtcactga

SEQ ID NO: 948 - DNA, 164 bp, Setaria italica
  source 1..164: mol_type = other DNA
cagagagtaagtttcctggtgtggtacttttacaaggaaacttactctctgtgttgactagtttgcaacatttggtagcgcaagcagtgcaacacagagagtaagtttcctggtgtggtacttttacaaggaaaagatctcaaactcttccgggcttatttctg

SEQ ID NO: 949 - DNA, 178 bp, Setaria italica
  source 1..178: mol_type = other DNA
tttggctgggataagaagccaagagtaacatgctgtcttgcatgcttgtcagaactgcttatgtctgtatctgtaatttactaaatactaaagcatctagatgtaccaaaccataagttaccactcaatatacatgttcaggtcaaatcatacaccatgattaatttctatgctatgg

SEQ ID NO: 950 - DNA, 1570 bp, Setaria italica
  source 1..1570: mol_type = other DNA
gccgccgtggcgaccggcgcggcgaggggtccggcgacgagcgcgagcgggagcaggagcaggagcaggagcagagccggcggccgtacgtgttcgaccggcgcagcttccgccgcgtggtccggagcgagcagggatccgtgagggcgctccggccgttccacgaggcgtccaagctcctccgcggcatccgcaactaccgcgtcgcgatcctggaggccaacccgcgctccttcatcgtgcccagccacaccgacgcgcacagcatcggctacgtggcgcaaggcgagggagtggtgacgacgatcgagaacggcgagaggcgctcgtacaccgtcaaggaaggcgacgtcttcgtggcgccggccggggcggtcacctacctcgccaaccccgacggccggaggaagctcgtcatcgtcaagatcctccacaccatctccgtgcctggcaagttccagttcttcttcggccccggcgggaggaacccggaatccatcctgtcgagcttcagcaagagcgtccagagagctgcttacaagacctcgagcgaccggctggagaggctgttcggcaagcaggataagggcatcatcgtgcgcgcgtcggaggagcaggtccgcgagctgcggcgccatgcctctgagggcggccacggcccgcactggcccctgccgccgttcggcgagtcgcacggaccctacagcctcctggaccagcggcccacgatcgccaaccgccacggccagctctaccaggccgacgcccgcagctaccgcgacctcgccgagcacgacgtccgcgtctcgttcgtcaacatctctgcaggctccatgagcgcgccgttctacgacagccgctcgatcaagctcgcctgcgtgctggacggcgagggctacatcgagatcatatgcccgcacctggcgcaacgtcatgagggccggagcgagcgcggcaagggcaggcgtggcgaagaggaatccgagtccgaggagcaggagcaggaggaagccgggcagggataccacaccatccgtgcgcgggtgtcgcgcggcacggcgttcgtggtgccggtgggccacccggtcgtcgaggtggcatcccggggcagcaacctgcagatagtgtacttcgagatccatgccgacaagaacgagagggtgttcctggccggggcaaacaacgtcctcaagaagctggacgacacggctaaggagctggcgttcgcggcaagggcgagggaggtggacgaggtgctcgacgcccagcgcgaccagggcttcctcgccggcccggaggagagcagtcgtgaggagcgggaggaggaggaggaacacgaaggacgccgcggccccaaggagtgggagaaggaggaggaacgcgaagcacgccgtggccgcgagcagcgtgagaaggagaaagagcgtcgtggccacggacggcgcgaggaggtggcggagacgttcctgaggcttgctaccggccggctgtgaggccgtcttacgctgatcgatgatcgagcaagcaacaagttgagagctagtgagcccgagcagtgatacgctggaca

SEQ ID NO: 951 - DNA, 529 bp, Setaria italica
  source 1..529: mol_type = other DNA
taacaaaacggaaactaaaaggaaagaactaaggaacgttaacgaggtctaagggtcgtagggtaggttggtacgtaggttgcttcgacgcccagcgcgaccagggcttcctcgccggcccggaggagagcagtcgtgaggagcgggaggaggaggaggaacacgaaggacgccgcggccccaaggagtgggagaaggaggaggaacgcgaagcacgccgtggccgcgagcagcgtgagaaggagaaagagcgtcgtggccacggacggcgcgaggaggtggcggagacgttcctgaggcttgctaccggccggctgtgaggccgtcttacgctgatcgatgatcgagcaagcaacaagttgagagctagtgagcccgagcagtgatacgctggacatgcaaatgcggcatgtagtagaataagtgtggctctctatgtatgctactgaggtcatgttcataaataaacaaatagcaagtgctctataaactgttgagtgcttctattaaaccttaaaaaaaaaaaaaa

SEQ ID NO: 952 - DNA, 302 bp, Setaria italica
  source 1..302: mol_type = other DNA
ctgcaggattattgttgctagggtccctaaacatggatacttggatagccaattcataccactaatagacgtcatttacaaccaaaagaacaagacaacagagcaaacagcaagaggaaattgaattcattcctcgtgaattcaaaatatattccttacctccgaggagttgatccagatggaggaacaatagtcttcagcttaattactcgtttctttcgtcgccttgacttcgttcttgacgcttagaaaggagggatggtcctctttattgccaagctgacccttctaaagcttctcgg

SEQ ID NO: 953 - DNA, 109 bp, Setaria italica
  source 1..109: mol_type = other DNA
ctggtggttgattatgtgtctacttttgggagacttagatgctctattatcatgtctcccaaaagtagacacataatcaaccaccagacacatcaatttaaaactaaaa

SEQ ID NO: 954 - DNA, 222 bp, Setaria italica
  source 1..222: mol_type = other DNA
ttgtttctttattagtcttgaagggagaccgatttagttgaggccctgacttacagagttggccatcactcgacatctgatgattcaaccaagtacaggccagttgatgagatcgagcattggcgaacagcaagggatccaatttccaggtacagaaaatgggttcaggggaacgactggtggtctgatgctgaagaatctgaactaaggagcagagtgagg

SEQ ID NO: 955 - DNA, 174 bp, Setaria italica
  source 1..174: mol_type = other DNA
gctttagtatccttgaaatgtctcgatgagagcgataaggagtaaaagacggtacaaccaccatcagatccccgcgcagcgcctagtcgatctcctggagggaggcaccgccgacgacgtcgccgccgctgctggtggcgccgccgccaccggcagcgcctagtcgatctcctg

SEQ ID NO: 956 - DNA, 215 bp, Setaria italica
  source 1..215: mol_type = other DNA
ttttctttttgttttatttttaacgttttcccttttcttttccctttccctaaaccattgcaagtacagggccagagctgagaaagtcacacagtccattgaagaaaggtctgtctttgagatcatggtagtgcttctgagcgaattctttggatggaacaatcagcttgatggcaacaagcttgtagcctttttctctcaaatcgagacacaat

SEQ ID NO: 957 - DNA, 236 bp, Setaria italica
  source 1..236: mol_type = other DNA
tttctttttgtttttatttttaacgtttttccctttttcttttttccctttttccctttttaaaccttttattttgttctaagtacagggccagagctgagaaagtcacacagtccattgaagaaaggtctgtctttgagatcatggtagtgcttctgagcgaattctttggatggaacaatcagcttgatggcaacaagcttgtagccctttttctctcaaaatcgagacacaat

SEQ ID NO: 958 - DNA, 183 bp, Setaria italica
  source 1..183: mol_type = other DNA
tctttcttcttgcatatttcttccaataaccaaagcaaagagggaactccgcaagaaatatgcagatcatgaaggtagacttgatggtgccaacaaagttatagaggtgtatgaacgagcggttcttgcagttacttattcagtggacatttggtagacttgatggtgccaacaaagttatag

SEQ ID NO: 959 - DNA, 147 bp, Setaria italica
  source 1..147: mol_type = other DNA
ggaagaaaaggaaatatcttcgtataaaactagacagaaacattctcagaaactgctgcgtgatgtgtgcgttcaactctcagagtttaactttctttcattcagcggtttggaaacactctgtttgtaaagctgcagtggatattt

SEQ ID NO: 960 - DNA, 205 bp, Setaria italica
  source 1..205: mol_type = other DNA
tcaaagctctgcttctccctctgacccactcgtcgttccgagctcctgttgccttcctcttacgggagcagacacgagagtgatcagggttcagggcaggggcctgctgcttcgtgccttcgttccaaacctctgcgggccgtgtagccatggaccggggccggcgtcctgcacctgtgcgcctccgccgcgctgctcgtcgtcg

SEQ ID NO: 961 - DNA, 117 bp, Setaria italica
  source 1..117: mol_type = other DNA
aaaacttccaattcttacagctaattaacagtccaaaacaccactcacactagactctagagatggctgacccagaatattttagtagtatttggatcctaaccagaagctagctag

SEQ ID NO: 962 - DNA, 146 bp, Setaria italica
  source 1..146: mol_type = other DNA
cttttgcagtcttgttttgaacttcttcctgaaccatggtgtacaaggttcctcaagctgcacaaatgggcttctatggctcacgagggccatgaaatttcttcagagttttggtgtatgaatcagtgcatgcttgactcatagga

SEQ ID NO: 963 - DNA, 169 bp, Setaria italica
  source 1..169: mol_type = other DNA
tttttttttcttttaagtttctttgttagtctagcagcttctgcagcggcttatgcacaagccgtgccaaagtgaggaaaaggaaacggcttcagtggagaagccagtgaaaagccgtcacacgaaatgaattggggcaacaagccacaaaaagcggcttcttcccgtc

SEQ ID NO: 964 - DNA, 197 bp, Setaria italica
  source 1..197: mol_type = other DNA
catccagaaggaatccactcttcatcttgtcttgcgcctccgtggtggccttgttaactaagggatcaagacaagatgaagagtggattccttctggatgttgtaatctgccaaagtacggccgtcctccagctgcttaccagcgaagatgagcctctgctgatctggaggaatcccctccttgtcctggatcttgg

SEQ ID NO: 965 - DNA, 102 bp, Setaria italica
  source 1..102: mol_type = other DNA
ttttaactcttctctgtctacagaattcagtttgtttctaaaattacctgctctaaatctccaacttactatcttggttacagaaaattcacctgcactacc

SEQ ID NO: 966 - DNA, 150 bp, Setaria italica
  source 1..150: mol_type = other DNA
taaggtaatggcaaggaatttcggtatgtagatatcagccctgtagctggggaaggcaacaaaggcatacagatatatagtttagaatggattcctatgaatttattgctggaaaaacccaaataagtgctttcatgagcagtatttggg

SEQ ID NO: 967 - DNA, 166 bp, Setaria italica
  source 1..166: mol_type = other DNA
aagacaaagcaagggagtgtttcagcgtcttcgtcgtcgcggccattctacagcttcatgccggtcggtccagttcgatgcgagagacccctgagcgagatcaaggccgacgtgtctgacggcgtcgatcttgaactgaagctatgaaaggagctcatcactgtga

SEQ ID NO: 968 - DNA, 167 bp, Setaria italica
  source 1..167: mol_type = other DNA
taaagtaaaataagaaagtaatgcgattaatacattattgaaaatgtcaaggatagcagaatctgtctatgatgtttctcagccacaaaaaggaaaattaatacatagtaaactaaactaatctaggcaacttatttgcaattcccaatcatgtgatcttaagaatg

SEQ ID NO: 969 - DNA, 172 bp, Setaria italica
  source 1..172: mol_type = other DNA
gtaggtccatccgtaaatccaggggcatcgcatctttatccatttggcaaaaacgctagttttgaaccaaaagaacggaaccgaaaagcaagttaaaagaaaggctttaccgatcatttcagcattaagtctacaagctgtttcatattttgcagattttaattgtcttgta

SEQ ID NO: 970 - DNA, 264 bp, Setaria italica
  source 1..264: mol_type = other DNA
taagaaggtgagcctgaagacttggagcccctcattgctgatcttggtgaggtagacccattcatggcagcggattagagacaatggacaaacttggaggactccctttgcagtttgtgcacttcttgagctcatctattctacaaaattgttaaattctgtatggatatgtgatcagttcctgaatcacaagcttcatctggttactggccagcctgatcaagcttgtgattcaggaactgatcacatatccatacagaattt

SEQ ID NO: 971 - DNA, 180 bp, Setaria italica
  source 1..180: mol_type = other DNA
taaaagggggaagtacgttacctaggttacccccctagtttacaattttagaatttagtttcaatgagagccacatttcctgtttctaacgctcggatcaaggctacagaaaggtttgaagcggcctacccaacagtcaaggagttggctcttgctggtcctcctggctctaaaactgtg

SEQ ID NO: 972 - DNA, 192 bp, Setaria italica
  source 1..192: mol_type = other DNA
aggggacaggacgaatgtgacgagaggagtcaaacttgaaaagatcacagcataggatgcaggtgtgtctcgtaacccgtagtagtacaaggccattggcaaggaatacccggcaaaagcattaatgaagagccatccaagagctttcttgtccaattccttccacttcccactttcgaaaattagagcaaa

SEQ ID NO: 973 - DNA, 250 bp, Setaria italica
  source 1..250: mol_type = other DNA
tacggttgtcttatttctaaaaggtttttctaagttctagttctagtcgtaggttggaagaaaggaatggaagcttatggattggctctgtcatgtcaccttttcttggagtatatagattgtagaagcatttggattgtatgattgaatatgcaacgtgtatatgcgtatatggtagtcgtttaatagaataacattatacacgtgtatatgcatatttttcccaccatataatcaaatttatttgaac

SEQ ID NO: 974 - DNA, 260 bp, Setaria italica
  source 1..260: mol_type = other DNA
ttttttgttttttacttttttcttttttattttttagttttagttttctttaacttagtaatactctagtgtacagcgtttctgatggcactgcagagtttgcttgacagctggaatcaaaggagtttccttgacagctcaactgtcggtgatatcagaagaaccacgagcaggtgtgcgcgcggggcattactaccatccccaaagtataattctacgagactccatgcatgcataacaggaaggcaagaaggtatact

SEQ ID NO: 975 - DNA, 264 bp, Setaria italica
  source 1..264: mol_type = other DNA
aaaatttacttctgtgactaacttagaatagacaatagcaatggctcctaccgcttgcttttgcttgtgcatcggcctcctcctgtggcaaagctctcgccagcttggagcagctgctgctgcttccagctccggctccggctccggcggctgtgagttcgcgttcgacatgctgcacccgctcgatccgattcggaagataagatcggaagcggggaccgtcgactacttcgacgaggcgaacagcagctcctctgtgcgggt

SEQ ID NO: 976 - DNA, 247 bp, Setaria italica
  source 1..247: mol_type = other DNA
catgcagtatttccagcaaattcattgccggtgctacctgaccgcaatgactagtgcttcttcatcaatgccaatatttagattatttgatggtaaagtgttattgtagcagtgtaacctcaagccttttatttagtttcatttccattgttatatattttgttactctataacgcaattggtgatttgaacatgccagaaatcttattaaagaaagctagtcaattgtattattgtccgtttaaaa

SEQ ID NO: 977 - DNA, 297 bp, Setaria italica
  source 1..297: mol_type = other DNA
tgacaatgttctcatcaacgatagaaaactgtcagatcttccaaagataagacagccaacgttgataatctggggggagcaggatcaggtttttccgatggagctggcgcataggttggagagacatcttggggataattctagattagtagtggtgaaaaacgctgggcatgcggccaatatagagaagtccaaagaggtgtgcaagagcatcgttgaatattttcaggaacaggattcaagtgcttcaacggggggaaggaggtgcagctgtactgattgcgggaaattctgaac

SEQ ID NO: 978 - DNA, 303 bp, Setaria italica
  source 1..303: mol_type = other DNA
aaatactgtatgtatgttcctttcatgttgtttttgcaccatgtttctgatagatatgtatgctactgcatcgtaaatttcttacccatgtcaacactaatttgcttcagtttttttctctggctatattgcttcatggtttcatgacaaagctatttttttttaccatttccaggtgccagtgtatttgcaaacagtgaccaaaaagttgtgctttgctctgccgtggagtcatggcagcaaagatacgtgtcgtgatgaagtcttttacgagccaaagcaacaaagtctcagggtcttttt

SEQ ID NO: 979 - DNA, 320 bp, Setaria italica
  source 1..320: mol_type = other DNA
gcacgaccgcactgttccagtttcattcatccaaatgatgagctggaaaacaggttttcagctgaaagcaatttttacggtggatctaatggatccataatatcagaagatacttttccaaactcttcacctctgaccctgggcaatgaaagaataaactctgatactcattgtgatgtaccagaagggagctcagcaaatacatcaacaggaaaatatatggattaccttcaaggagttgcctcaaagctgaaacatcttgtattttgtaaactaatttagtaaactaaggttagtactaacggttaaactttagttaa

SEQ ID NO: 980 - DNA, 322 bp, Setaria italica
  source 1..322: mol_type = other DNA
aggaacgaattacaaaccgcctcagcatccaaaattgcctgaaactcagctgctggggtatcagttccatcccaaacataaaatgtccattcgccattactttcatggacatgaagaaccttgcatactaagtcaaaagtagtttcagactttaaactccttaactgcaattcaagttctttcatacctggaggattgtatgcaagccacatcctcatctgggtcaaaagttcattgtcatatttgctcccatgatatttcatagaagtctgatatgggctggactctgtagatactttcccttcaaatagggcgaatgaag

SEQ ID NO: 981 - DNA, 119 bp, Setaria italica
  source 1..119: mol_type = other DNA
cagatggtgtcagtgcttgacacttccggtaaaattatagttacttcagatttgcaaaagtggaactcttttaccactgttacagcaattgagcctgttcaggttacaaactgtacaat

SEQ ID NO: 982 - DNA, 135 bp, Setaria italica
  source 1..135: mol_type = other DNA
taaagaaaaacaaatagtaatagaagtgttgaagcgagatgcttcagcccttcagaacgacggcagtaatccatatcaaacgcaatgcccttgggagctacatttgcctagcgaacgtagttgacaccatttgaa

SEQ ID NO: 983 - DNA, 207 bp, Setaria italica
  source 1..207: mol_type = other DNA
tggccagtagaaacaaagccaaagtaaaaacaccagctcgagtctcgtcacacgagttcacattgttaatccatggaatcccttaatccattgtttccagatattgcatttgtttcaggcctgtttgtttccttgctttctgttcgctgtcccaactgcaatcatacaaatgcaatatctggaatcccttaattccattgtttccaa

SEQ ID NO: 984 - DNA, 142 bp, Setaria italica
  source 1..142: mol_type = other DNA
cggcagaagtgttggtagtggaaaacatcacaaggaggcttccagggagatgagttatgtaccacgtgcagactgtccttccctgcatgtggtacataactcatctcactaccaacacttctgccgatgatggctgccaggg

SEQ ID NO: 985 - DNA, 145 bp, Setaria italica
  source 1..145: mol_type = other DNA
tatctccgactcagtctatactatggcggtgcagcagctggtgagcatcctggagctgcccaccgaagctgatccgttggcccagttgctggccggtctcgtccctgatcccggctgcagcggaggcgaagttgacgccggtgag

SEQ ID NO: 986 - DNA, 150 bp, Setaria italica
  source 1..150: mol_type = other DNA
agccagcatggttcgacaacagcgtctcccagatgtcctgcagagatgatttatactgtgtgcttgaatcaactgaaaagtcacttcgggccacatcgtttcttactccaacacaaagcaattgtgtactcgtcgaggaatggacatgca

SEQ ID NO: 987 - DNA, 313 bp, Setaria italica
  source 1..313: mol_type = other DNA
taagcaccaaccatccttggcacatgacatcaagcatttgggtacacaaaatacactcaagttaagcatcatccaaagtgtccttacactatagcggctactgactcagaaatggagcgagcatttgtcacatccgtctgacacgcacaggcacgaatgcacgatggagtacgtcgccgtggtgatcatgctgacttgaccagcccgttccgccgagactaacgagctacactggagctccgattgggccctcctgtgccactgctaagctaattcctctcctaatccatcccactaaccaattagaccttgg

SEQ ID NO: 988 - DNA, 365 bp, Setaria italica
  source 1..365: mol_type = other DNA
gtgtgtgccttttctttttctttgacacggcttaagtcactcatgtagctttaacataagaagccttctcgttgtcgatgttaattagattactttttgaaggaccaaatccgcaggtgtcactttgcagatgttgtttccagttgttccacgaacaccccctcccctccctcatgcccgttcatccacgcgcaaacggccatttgacagtacaacactgtaacaattagcatggtttacttgcctggcaatgtgttaaagaaccagccggattgagtatttgagtgtgctgcggtaaaaagtgcatagttatttgttcaagggtaatgtctctatcaataccaaggattaccgcatatattaat

SEQ ID NO: 989 - DNA, 154 bp, Setaria italica
  source 1..154: mol_type = other DNA
acaggtgaatcagacgtatattaatcaatgatgaggctactttggtgagatggaagatttatgcgatcagagttgtatcaacctatatgtgaaggaggtaaccgtgtgctgaataatcatatgatctgactctgatttagggaattgctcggaa

SEQ ID NO: 990 - DNA, 268 bp, Setaria italica
  source 1..268: mol_type = other DNA
gggaagatgcacatggctgagaggcagtgggcagaagctgcgactgatttctttgaagcttttaagaactacgatgaagcaggcaatccacggagaattcaatgcctcaaatatcttgtccttgccaatatgttgatggaatctgaagtgaatccctttgatggacaagaggccaagccgtataaaaatgatcccgagatccttgcaatgacaaacatgatgtcattcttctggtacgctctttaattctttagtatttgtttatata

SEQ ID NO: 991 - DNA, 341 bp, Setaria italica
  source 1..341: mol_type = other DNA
cacggtgaggtcggtgttgaagtactcgcggagctgggtgatcaccccatcggcgcccacggtccaggcgtgcacccagtacacaccccgctcctggtcgccgccctcggcgatgacggtcgacccgaaggcgtccacggagcgcggcgcgaagcggaagctgctgctgctgtttgatccgccgccggcgagagcgaggagcaccaggaacttagttaataaaaaaaacaaaaaaaaaaacaaaaaaaaaaaaaaaaaaaaaaaaaagagcgaggagacaaaccaaaggaaaacttaaagttaaaagaaaacgaaaaactaaaaagaaaactaaaaccaaa

SEQ ID NO: 992 - DNA, 191 bp, Setaria italica
  unsure 160: note = unsure at all n locations
  source 1..191: mol_type = other DNA
  unsure 164: note = unsure at all n locations
tattggtgtgacctgggaagaagagatcagggagcgatgtaataatcaaactttatttcaaaatttagagatgagaattggtgttattttattgtattctgatgagtttatgaagattgaaataatatttcaggaaaatggctaattattgaaccaaaanaaanaaaactaaaaagaagaactacgaaccg

SEQ ID NO: 993 - DNA, 119 bp, Setaria italica
  source 1..119: mol_type = other DNA
attacctcagcttgttggtgtgtttaagacagccgtgtaattacacgtacataacaacttagctaccacggtaagtggtgaaggaggaagtgctctgccgtctggttctcttttgcatt

SEQ ID NO: 994 - DNA, 197 bp, Setaria italica
  source 1..197: mol_type = other DNA
tattcttgacctactgtccgatgctgcagagtgtgttcttcagcagtcagtgattaaaggtcttcaagaggtgccactttcaaatttcgcagatgctgagagcttagtttcacgtggtatgctgaagcgcagcactgctgcaacaagtgccaacagcaagtcaagccgatcacagtgcatcataacgatacgtggtt

SEQ ID NO: 995 - DNA, 449 bp, Setaria italica
  source 1..449: mol_type = other DNA
aaggtaggtggcatcgtcacgggatgctgttctttggactacaatgatctcagcttatggcaaatttggtcgggtacaggatgcagtcagcttgtttgataggatggcacaattgggcataaagcaggatggcatagcatatcttgcagttttgtcagcttgtagccatggtggacttgtcagagagggttgtcactacttcaatttgatgtctgatggtcaaagctcagttaagatgcatcctgagcactacggatgcatggcagatcttctatgcaggagaggttacctagaagaagctcttgaattcattgagaatatgccatttgagtctagcattgctgcttggagtgcattacttaactcatctcgaatacatgggaacgccaagttgagtcaacttgcagcatcccgtttgatcaagcttgatcctgacgaaccacagaccg

SEQ ID NO: 996 - DNA, 295 bp, Setaria italica
  source 1..295: mol_type = other DNA
aatgttgcttgaaggagtgcgtcatcaactggttctactactactacgattcaattgtcctgcgctgatcatcatcctaggttcaggggtgcttgcgtttttgccttaacttctccatcttctatgtgatccattcaactacagcagtgactttcaatgttgctggcaaccttaaagtaagacacgactatattctgggctgttgttctctccctgctccctccgctcgctgaatcaacatgcttttgtaggttgcggtggcagtactagtgtcgtggttgatcttccggaacct

SEQ ID NO: 997 - DNA, 357 bp, Setaria italica
  source 1..357: mol_type = other DNA
cttgtgtgcgcaccaggaatctgtggctgagtcatagatgtcccatgaatttggtgacttatctgtcaaaccaagtccaccagttatgtatagtttctctgtgagagatgcagacacaaaatagcacctgaaataaagtaacagcgcatcagcaagtggtcgccaattttgtatcagatgctgtatatacaacttataaaacatgagatgctatatataggtactgagaaggtacatatggatactgcttaaggtaaatatgtgatgtcatatataaatatcaattaaaggaaaacatgggatgccaatgaacattgtcattagaaatacctaggtgtaggcattggagctgctgtg

SEQ ID NO: 998 - DNA, 155 bp, Setaria italica
  source 1..155: mol_type = other DNA
gtggacatgccaggagattgcacataaccaacacctctggaccccatgatgtctcaggttccattgtaccagtcgttcaaccatggctaagagattctttatgctggaaagttgggaactatttctgaagactccacttaacaacacgacatagt

SEQ ID NO: 999 - DNA, 235 bp, Setaria italica
  source 1..235: mol_type = other DNA
aatgctgcatcatgcgctagtgctactgttaatttgtgaggcattaagaaagaacaagtcggggagagtgaggattcctaatggcattaagaagaacaagtagcactagcgcatgatgcagatctggatgctgcatcatgcgctagtgctactgttaatttgtgaggcattagaagacaagtcgggaacttaggaatcctcactctgggatgctatcaagcagatctggatgctg

SEQ ID NO: 1000 - DNA, 505 bp, Setaria italica
  source 1..505: mol_type = other DNA
tttttagctgagagaattgttctgttaacggtaattgggaacaaggtttgctttccagtttagctgttacgatattacatacagcgtaattgctgaacttttgtcttgttgaaaaatgaacaatattctttttgccaataactaagcgtatcattttgctgctaacctttagtttgaaatgcgtatctgtagagaaccaagtgctttggtatatgctattaagagatcatgtgaaaacaaagctgaagtggttgcacaggatgagaaggaaagtggtcttcgagcgacactaaacctgggtcacacatttggccatgtatgtattgccatcgatcatgtctagatttttatgttcagttaatttatactggcattgatagattttgggtgccaaaacctcatacaccttatcacaacagcatctatctgaattttagccaccttatgttattgcattgcaccacttattcactgatcctcacactcaattgacaggctaggtctt

SEQ ID NO: 1001 - DNA, 688 bp, Setaria italica
  source 1..688: mol_type = other DNA
agccccatcttccacatggtgtccgcaacgcagaccaccctggctgcgaccgcccgcgtcgtggagctgaagctcggcgagcttggcatcgagtaccgcctgtccgcagccctgccggcgatggtctggcggcggcatcgagcggtgcctgtcggaggcgctggcgccgcatctgcatggcctcgccggcgcctggaacgacctcttctgggcggcgcaccctggcagccgcgcgatcttggacagctatgaggccgctctcgggctgcagccggagaagctggcggccagccgccgtgtgctgagtgagtacggcaacatgcttggcgcgaccgtcttcttcgtcctcgaggagatgtggagacgccggggagctaacgaggaggaacgggagaaatgcgcgtgggggtcatgttgggtctcggcccggggatcacggtggagacgatgctgctgcatgctgccggtagccaggacgaagactagaatatcaccgtcgtcacaccttcctaaatatacgtacgacagtacgagagagttgacatgcgcttggtctatttgtaatgagtgattgattggatgatttgaaacgtttccagttgagtctggatgatttgaaacttttccggttaagttaatatttcatatgtgcatgtttatgactaaaaaaaaaaaaaaaaaaaactag

SEQ ID NO: 1002 - DNA, 179 bp, Setaria italica
  source 1..179: mol_type = other DNA
tgatacggaagcggattgctcagttctttgttactggctgtacggaatctgcatcgcacatcttcggatccacatgattgctgtcattggactatcttgtgattgaaagcccttccagctcacttctatcccagcagttcaactgcaatgctttggtcttcagttgctcaaaagcagat

SEQ ID NO: 1003 - DNA, 129 bp, Setaria italica
  source 1..129: mol_type = other DNA
acacatggttacaggattacaagatgcaacgatggcatcctcacaaaaaaatgatgtattgatgccaacttttgacaggggaaatcaaatttgaatctgtctagataccttatgacagatttataattt

SEQ ID NO: 1004 - DNA, 129 bp, Setaria italica
  source 1..129: mol_type = other DNA
aatttccagaaacaataattgtcttcatgcacaagcaaatacatgtcttgtgcatgaagacaattattgtttctggaaattcatatccaagcaaccagatatccagagctgaggatttcaataacgaag

SEQ ID NO: 1005 - DNA, 361 bp, Setaria italica
  source 1..361: mol_type = other DNA
tgggtgctggattcttgggtaaaggttattctggtgatttgtgacgacttccttgatgtgaggtgttcacctcggagatggtattgctttgatgcattcttgattgctgctgctactactgcataaacctctacagccatatatgggtttatctagtattattgaccccgtttctagcttgttgctattaagagttgacatggcctacccgcttctcaggttcagccgactacgacttgaagatggatgagaagactagggtgttgaccttgctcaagttgcctgttggatatggagatccactcacttgatgcgctacgcttcgtaggtctttttctatgtttgatgcagtcctggcatg

SEQ ID NO: 1006 - DNA, 235 bp, Setaria italica
  source 1..235: mol_type = other DNA
tttcatccagagatgaatgagcgtgaagccgctaacttcatggtacgaacatgtgttgatgcttacaacaagtggactactgcagggtatgacttgattcagtacttgcagcagggtattgagaaatagtttgtttctcgtttgtagatggtatatgttcgtgtacatcaattgtatgtagcaactaataccatctacaaaacgagaaacaaactatttctcaataccctgctgc

SEQ ID NO: 1007 - DNA, 135 bp, Setaria italica
  source 1..135: mol_type = other DNA
aagcatagtagcgtacgatgagagattattataggtggccataaaagtgggcgtgagagacaagacaggtatatgatgataatggtacctgcagatctgcaggtaccattatcatcatatacctgtcttgtctca

SEQ ID NO: 1008 - DNA, 172 bp, Setaria italica
  source 1..172: mol_type = other DNA
taatgatattggcagtgctcataatatggaacaaggggacaagcaagacatctaccagtttcgggccctaaattctcctcgaagtgatcacaggcaaaccgacagattctcaaagcgaactggagtccctgaaagctctcgctgctcgcccacccatcctgcacttgcatgg

SEQ ID NO: 1009 - DNA, 310 bp, Setaria italica
  unsure 87: note = unsure at all n locations
  source 1..310: mol_type = other DNA
aataggaaccaataggactaggaataataaccggtttacaaccaattaggtacaaagtagaatggtcggcattgctacatccccttntataggataacggagaagcagaacagagtctcgataaccgacaggatgtgggcaaggctgctttcctcgaccaaccagccaagcttcctctgcaacaaagttgtcgaggaggcgaagaaggaagaggaaagaacggcccaacttatagatggctcgccgtcccatccgagaatataagcggacgttgacctcacttcgtagcactggagctggaacctgcggt

SEQ ID NO: 1010 - DNA, 379 bp, Setaria italica
  source 1..379: mol_type = other DNA
ttattcacatctaaagaagttggtgctagaagctgtgcgaggcgaggatagtgagctggcatttgcaaagtttgtcatggaaagagctcaaatgctggaggatatgcgtgtcttagtggatggcagttgttcaagagatgttgttctaagtcgtttgtcttcggaagggtgtgtatcagcagatgctacagttctggtggagaggcacgatgggactgcatggaccttccagagagccattgacttgttgcagagtgacccatttggttgctgaacctggaggtattctcaaagaccttctcagatactttttcatgttgtattctgcatatcaagttgtattataattgttagccttagcccttcagtatagttaagg

SEQ ID NO: 1011 - DNA, 382 bp, Setaria italica
  source 1..382: mol_type = other DNA
caagtcctgtggaggacagattcagggccgataccctgtgcttatgcctgtgactgcaaatgatgccgatccactggcagaaatcagtgcttatttcccatgaggctagtgaatctgactgcaggcttaggcctgccttcagtgctagcaacgcatcctggtcagtctcatttctgctcagcaatgcttgagtgcatgaagttggtgccaacaggagcagatggggcaagataagcaattttagaactggaaacattttgccctctggcactgaagaacattgaacaaaactaaatttagtgactgggtatgttccactcgaaataataagaatgctagtaaaatatatcattgacattaatcatcaatacaaagtttaata

SEQ ID NO: 1012 - DNA, 313 bp, Setaria italica
  source 1..313: mol_type = other DNA
aaagaaataaaagaaaataaataagacttaagaacaactctcgcacccaaacattgtgcagtatcatggaagtgatctgactgatgatgcactttccatttatcttgagtatgtctccgggggttcaatccacaaattactaagagagtatggctcttttaaggaacctgtgattcgtaattatactggtcaaattactaagagagtatggctcttttaaggaacctgtgattcgtaattatactggtcaaattcttgctggtcttgcctacttgcatgggaggacactgtccacagagatatcaaaggagcg

SEQ ID NO: 1013 - DNA, 272 bp, Setaria italica
  source 1..272: mol_type = other DNA
actgaagcagtttttttcatggatattagttgatatttttccgattcaggctccttcgttgttttgttgtttccactatcttctgcagctacttctggcttagcctctttgtcttttgtgttatcttcgttctgttctgcaattggtgcttccattcaaccaactagctggttgaatggaagaagttgttgttgctgcgagaaggcattcgccaaagctagctggttgaatggaagaagctgttgttgctgcgagaagatagtggaaacaac

SEQ ID NO: 1014 - DNA, 434 bp, Setaria italica
  source 1..434: mol_type = other DNA
taacggtaacaaaagaacaaatacttaatacaatacaccggccgtgttcttacaacaacagtccgccctattgcagcagcaatacttggcgcatttgacattacagagcatcatggcacaacaacaccaggtgctttcaccattcagccgactatccttggctagccccgccgcatactggcaacaccaacagctgcttccattcaaccagctagccgtggagaatgcctacttgcagcaacaacagctgcttccactcaacccacttgctgttggcaacccgcgcttctggcaacaacaacagctactacgtgtcaacccattttcctgcgatgaaccccgcgcattctggcaacacagcagctattgcgtgtcaacccagttgctgcgatgaacccgcgcttctggcaacaacaacagctactgcgcatcaa

SEQ ID NO: 1015 - DNA, 380 bp, Setaria italica
  source 1..380: mol_type = other DNA
tttgaaacccactagcagcctcttattagcaacaatggcagcaaagatatttgctctttttacgctccttgccctttcggtgagcgctgccactgcagtctttcttccgcagggatccctagctgctactgccgctattccacaatacctcccacatgtgacagccttgggatatgaaaatccaattgtgcagtcctacaggctacagcaggcacttgcagcaagcatcctaccatcatcggccatgttcctaccacaacagtcggccttatgcagcagcaatccctgtctcatctgacagtacagagcatcacggcacagcaacaacgcattctatcaccgttgaaccaactagccttgccgaacccgccgcatacttg

SEQ ID NO: 1016 - DNA, 508 bp, Setaria italica
  source 1..508: mol_type = other DNA
ccggcgtctatgatgctgcagcaaccgtggacccgaccgttccagcagtactggactccaaggatgatgccgtttcaacaatgtcactgtggtgccatctcacagatcatgcagcaacagcaactaccgtccatgttcaacccgatggctacagcgatcccgcctatgttcttccagcagccctttgctggtgttccattctagatagatgtcctcatgctgtaacaataataaagctgacatgccatcgcatgtgaatcataacgaataagaaaagtgtcgaatcaatggctttccattcattatctaatatactcatcatgtgccttttccttgagaggcatgaggccttaatgaattattgtattagatatatagataaatttaataggtagaaatgcctatacataagacaacagatataaagtaattaaactaaaacctaacttaagttaagttattttaagtttttacggggtttttacttttttaaaaggtttttttacta

SEQ ID NO: 1017 - DNA, 367 bp, Setaria italica
  source 1..367: mol_type = other DNA
ttaaaattacctaatagtctacctattatttacttagttttctaggtaagtctaaaaggtctaactacctattggtctagtcctaagtattgttttgcacttgtttgcacttcttgctctttgtgcaagcgccactactgctacctatgtcccattgggcgccatgaacccttgcatgcagtactgcatgatgcaacagccgtacgccgtgaacccatgcatgcagtactgcatgatgcaacaggcgcttgccatgggcagatttgcctcaccggcatccatgatgctgcagcaaccgtggacctcaccacttcagcagtactggactccaaggatgatgcctagcatgatgccgtttcaacaatct

SEQ ID NO: 1018 - DNA, 397 bp, Setaria italica
  source 1..397: mol_type = other DNA
taattaaattacctaattagtctacctactatttacttagtatttctaggtaagtctaaaaggtctaactacctattggtctagtcctaagtattgttttgtcacttgtttgcacttcttgctttttgtgcaagcaccactactgctacccatgtcccatggcacttaccaccagtgacgacattgggcgccatgaacccatgcatgcagtactgcatgatgcaacagccgttcgccatgaacccgtgcatgcagtactgcacaacgcaacaggcgtttgccatgggcagatttgcctcaccggcgtctatgatgctgcagcaaccgtggaccttaccgttccagcagtactggactccaagggatgatgccgtttcaacatggcaccacagtgaca

SEQ ID NO: 1019 - DNA, 500 bp, Setaria italica
  source 1..500: mol_type = other DNA
gagggttttgtatatatattcaattaaacttgagcaacatcttcactatgcgcccgttgtgtggctgcgctgtccatctagttaagtatgcttgttcggagctactttcccaattcttgatatttgtttcttagtacatacataatcaagtacgtctctgaaggtacgatgtacaatttttggtggttgatgactatggtacgaacaattacagaatacacttggacaacataggacaatagaatctcaaccaacacttttcttatttcttaggatcacatgagtcggcatgcaaactttattataaaagtacaacaaataattgatctagcaaaggccagaaccaatgattggttgctgcaagaaggtagcggcgttcatcgcagcaagtgggttgacacgcagtagctgctgttgttgccagaaggcggcggggttggtgatagctagttggttgaatggaagcagctgttgccggaaggcattcgccgcgtaagtct

SEQ ID NO: 1020 - DNA, 385 bp, Setaria italica
  source 1..385: mol_type = other DNA
ttgaaaccgacaaccaacctcttagcaacaatggcagccaagatatttgccttccttgcgctccttgctctatcagtgagcgctgctaccgcggtccttgtaccacaggtgctcagtagccgccgccgcagccacaattccccagtacctctcaccttacacagctgttgggtatgaacacccaattgtgcaatcctacaggctacagcaggcgctcgccgcaaacatcttatcatcaccggcactccttcctacaacaaccatgggccctatcgcagcagcaatccttcgcacatgtgacagtacagagcaccaccgcacaacagcaacaatttctaccagcgtttctagcctaacttagtcccttagtcttagtccccgtcct

SEQ ID NO: 1021 - DNA, 457 bp, Setaria italica
  source 1..457: mol_type = other DNA
tttttttttttaggatgccaataaaatcatctttgtttattatttatgataattcatgactattggcatgtgaaactttattattggagtacaaactcatacatcatttagaagatggcaccaccaatgaagggctgctgcaagtaggggtttgccaaagccacttggttgaacacgctagataccagttgttgttgctgccagtgggcgataggactcgtcagagctagttggttgaacacgtttggcagcaatcgttgttgttgccagtaggtagtggtgatggggttcaccgaagccacttggttgaacacgctggacaacagttgttgctgctgccagtgggtgataggacttgttagagctagttggttgaacacgtttggcaggaactgttgttgctgccagtaggcagcggtgatggggtttgccagagccatttggttgaagatgtttg

SEQ ID NO: 1022 - DNA, 347 bp, Setaria italica
  source 1..347: mol_type = other DNA
tttaccgttaactttacttaagtttactttaatttaactttaatttgtctaaaccttaaactacttgtaaaagtctatttagtcaaacttcttcagcaaagatggcagctaagatatttgccttctttgctctccttgctctctcggcaagcgttgcttctgcgtacatttcaccagtgagtgctcttgccgcaaccgctagccccctatacttgccccaagctactactactctgttgccaaatgtgttcaaccaactggctttggcaaaccccattcaccgctgcctacctgcggcaacaacaattcctacctaacatcttcaaccaaatggctctggcaaaccc

SEQ ID NO: 1023 - DNA, 611 bp, Setaria italica
  source 1..611: mol_type = other DNA
aacaaaacacagcctagactgccgttcaaaaccaaacggactaattaaacccagccgccatcttgcagcagcaactgtcaccattgaacccacttgcattggcaaaccccgccgccttctggcagcagcaacagctagtcaaccaactagctttgacgagtcccgccgccttcttgcagcaacccatcgttggttctgccctcttctagattactgatgagttgtacttgaataattatgtttgcatgaggacatgggtgactccgcggaaataagaaaagtattggttgagattatgaagtcctatctgtgtccaaatgtgtttcgtaattctttgtgccatacattcgacaactaccaaatactatgtatcgtacctatggagccatacatgatttaagtacatattacatcatgcaaataccgtgaggcggttcagtatctccgaaagttcagatttcaccagatgggatagcacagccacgccacgggcgcgtagtaggacttaagataacacaatggttgtttcgaatgttccataggagagagaattggtcaacatcactaattattattgtgcatgttatatgccagtatatctacatgtttac

SEQ ID NO: 1024 - DNA, 327 bp, Setaria italica
  source 1..327: mol_type = other DNA
tttaggcaaaaccccctaacttgccaaagccacttggttgaacacgctagataccagttgggcgataggactcgtcagagctagttggttgaacacgtttggcagcaatcgttgttgttgccagtaggtagtggtgatggggttcaccgaagccacttggttgaacacgctggacaacagttgttgctgctgccagtgggtgataggacttgttagagctagttggttgaacacgtttggcaggaactgttgttgctgccagtaggcagcggtgatggggtttgccagagccatttggttgaagatgtttggcggcaacaacattcc

SEQ ID NO: 1025 - DNA, 420 bp, Setaria italica
  source 1..420: mol_type = other DNA
tttcttatcactgctgcctacttgcagcaacaacaattgctaccaaacgtgttcaaccaactagcactagcgagtcctgtcgcccaattgcagcaacaacaacaactgcttagtgtcaacccactgggtgtgatgaatcccgccgctttctggcagcaacccatcattggctcggctatcttctagattaactatgagttgtacttctttaataaagtttgcatgctgaggagttttactcttaaacaaaacatttcttatttccgagagtcaaactcctcagcatgcaaactttattaaagaagtacaactcatagttaatctagaagatagccgagccaatgatgaatcccgccgctttctggcagcaacccatcattggctcggctatcttctagtacaactcatagttaatctaga

SEQ ID NO: 1026 - DNA, 394 bp, Setaria italica
  source 1..394: mol_type = other DNA
tacctaactagtctacctattatttacttagttttctaggtaagtctaaaaggtctaactacctattggtctagtcctaagtattgttttgtctacttgttttgtctactttctttgtcttcttttgttgtctaagtcgtcctacttacttgtcttaccttattgttccctatttgggcgccatgaacccttgcatgcagtactgcatgatgcaacagccgtacgccgtgaacccatgcatgcagtactgcatgatgcaacaggcgcttgccatgggcagatttgcctcaccggcatccatgatgctgcagcaaccgtggacctcaccacttcagcagtactggactccaaggatgatgcctagcatgatgccgtttcaacaatctcactgtgg

SEQ ID NO: 1027 - DNA, 1116 bp, Setaria italica
  unsure 1113: note = unsure at all n locations
  source 1..1116: mol_type = other DNA
tcgcccacttgcagcaacaaacacttgtggctagcgtgttcaaccaagtgcctttggcgaaccccatcactactgcctggcagcaacaacaattgctaccaaatgtgttcaaccaactagctttggtgaggacgtaatcatgcaagagccagtggaccacgccgccaaggacgaccgcgacgtcgtagtggtcccccgtcgaggccaagcaacgcggcagacgcggagccctagcgacggtcaccgggctccactcgcccccagcgtccgacgacacagtctgcacacggatgcaccttgcgcatgagcgggcctggtggagaccggccaggtcagcggcgagtagcaggaaggagcagccgatgccgatgccgtcggcggcggtgagcaggacgtacgtgcaggtagtgtagaggtggtcgtctcttccgacgtccggcggcaaggggaggaaggtgcggccgccggtcatggggtcgtacacgcacatgtcggattcgctgcgctccaggacgacaagctcgccgcgggatgtcagcgcgggatgtcacggcctcgtactcctgctccagtaggtcggcggcgctgcgcgacacgaagggcgcgaggctttcctcggcgaaggacgcggcggccggcgtcgacggggtggacgagggagaatgtctcgtcaaggaagccgagaagcctcggcggcacgacgccgtccggcgctctgcagatgcgacggacaaacgcagggctgaggatctcgcgccgaaagagcttagcttgcacgccgcgtcgcaccggaagagggtgtcggcttccgagcgcgcggcgatctcgaggatgagctctgccgggagcgtcaccgcggccgtcggtgacgacgtgccgcgcggagtgcatgcacggcgccgtttgtgcggcggcatggttcttcttgcgtacagccgtatacggtatccagtatccactactagtatttatagaccagcagattgggagtttgggacaggacaaggatggagatgccctcggtgcatattgggattggtgttgtcccgtcggcatgcaacttcatagacggtataggatggcacctcacgacaagtttgaggaccgctagtntta

SEQ ID NO: 1028 - DNA, 477 bp, Setaria italica
  source 1..477: mol_type = other DNA
ctgtgttccacataaatggcagctgcatcgccatcctaatctgttgcaggtgcatcatctggcacattgcaccacagtggcactgtggtgacatcattccttgcatcatagactgcatgcaacactgttgctgcagcatggccaatggtgattgctgcatcaacattgctagcaagggtgagcctcctatggtgaatgctcgttgcatcatgcaagattgcatgcatgggaccatggaacccattcccataatcggtgagaatgagcttaccatggtgaatggttgttgcatcatgcatgattgcatgcatgggtccatcatgcctattcccatcattagtgggaagttttgcgggcatgtggctgtagtagtagcaactgcagaaagagcaaggagcacaaccagagcaatgcgtgatgccatggtattcgggtactatcacaataaaaatggaggtgttagtgagatggtacccg

SEQ ID NO: 1029 - DNA, 1501 bp, Setaria italica
  source 1..1501: mol_type = other DNA
tagttaacataagggaaaagttaaagaaggaacggaaaagggaactgtagacctattggtaaaactattgctagtcctaacttcttgtaagaataagcatctaactgaagtgttggagccatggaaaacattgcacctttccctggcaggacaactcttgttgccaatgttgctccagatgacgaggaccaggtctgcttgcaggcccaggaactcatgttcgcatacaacaactccctagtcctcagggcggccatccagctcggcctcctcgacgcgctctacgcggctcccacggcgctgaccgccgacgagctcgcggagcaaatcaaggccgcggacaagaccgaggcgaccgcctcggtggacaggatccttcgctacctcgcgtgcttcaacgtggtgaggtgctcgaccgagacgaccggcgtcggcggcgcggtcctgcggcggtacacgccggccccggtgtgccgttggctcaccaagaacgacggcaaggggtcgctggcccctttcgccgtgttcctcggcgacccggaccacatgttgccctggcaccacatagccgacacggtggtctccggtgggctgctgtcgtcgtcgttcgagaggaccaaagggatgccgttcttcgactacttggggaagaacaagcggctaggtacgctgttcgacaacgccatggctgagcactcggtgatcctggtcaccaagatgctcgagcgtttcagaggattcgacgatgttcgtctgcttgttgatgttggcggtggcacgggcaacacccttgagatgatcacatcccagtacaagcacatcaagggcatcaacttcgacctgcctcacgttatatctcaggccccatctcttcctggtgtggaacatgtggctggaaatatgtatgagagcgtaccctatggagatgcagttcttctgcagtggatcctccttatgcagaccgatgaacaatgtctcaagatcctgaagaactgccacaaagcactgccggaaggcgggaaggtgatcgtcatagacggcctccttcctgaaaacccagatgcaaattctccagctgcgaaggatgcgttcaccttggatatgtgtatgtttgtcctgttcaagggaaaggagaggacggaaagggaatttgccaagcttgcccgggagactggcttcactggggcaatccggacaacctacataatcttgaacttttatgcgatcgagttcaccaagtagaaattccagcatatatatgccagcatggtattgaataagagctgatatatagctcgcgtgtgtgcctcagaatatatgggttatctacgcccatgtatgtgtgtctttacggtgatatgttctatgaacaatgaaaacaaaaaatcaaaaattaaaaacaaaactaaacaaaggacacacagggagtaggtaagggtctattctaactttcgtaccttgtccttcttacgttttatttatttctttcttaggtccccta

SEQ ID NO: 1030 - DNA, 546 bp, Setaria italica
  source 1..546: mol_type = other DNA
agtagtactaccattctcattttaaaaaccacaagcacaaagctcatcgcagagcagagaacccaaccaaccgattgagatggcagcatccgctctgaaccccttcgtcgccgcctgcctcgtggccctcgtcgtcgccgcaggtgcggcgcggatcgtgccggacactgccacgatggatccggacatgctgacgacgaggccgtgccacagcaacaacgggtggagcggccacctctgcaaggacgtgtgcggggctagcgggttcagccgctacgacttcaccctggccaacacggccacgggatcccagtccacctgctgttgctgccccaagggctacaagaacgcgtgcctcaacgtcaaggagtagtgggtgggtttgccgtcgcgtgcgcaggctgtgacgagccacagtgctcgtgtaatgtaaggggagtttaggcataatcaaagagaataaaagttaagcggcaacgtactgtgtctcgactacttaaaaaaaaaaaaaatagaaatactaacctaagtaataacaaaaaaaaa

SEQ ID NO: 1031 - DNA, 525 bp, Setaria italica
  unsure 497..525: note = unsure at all n locations
  source 1..525: mol_type = other DNA
atgataagctcattctcaccaatgatgggaatgggttccatggtcccgtgcatgcaatcttgcatgatgcaacgggcattcaccataggaggctcacccttgctagcaatgttgatgcagcaatcaccattggccatgctgcagcaacagtgttgcatgcagtctatgatgcaaggaatgatgtcaccacagtgccactgtggtgcaatgtgccagatgatgcacctgcaacagattaggatagcgatgcagctgccatttatgtggaacacagcagccatgatgatgcagccaacctattggaggcagccctttcctagctgtgcctgctagatatatatatgtcttatgttgtacccaaggaataaagttcacataccatcgtgtgtgaatcaccagaaataaattattgagtatgatacatatattgtggtgaaaattcaaataaaaaaaaaaaaaactaaaagaactacaaccaaaaaaacacagggagtagnnnnnnnnnnnnnnnnnnnnnnnnnnnnn

SEQ ID NO: 1032 - DNA, 327 bp, Setaria italica
  source 1..327: mol_type = other DNA
tagtgttcaaccaagtgggcgacaggactcaccagagctagttggttgaacacgtttggtagcaattgttgttgctgcaagtaggcagcagtgatggggttcatcgcagcaagtgggttgatgcgcagcagctattgcgtgtcaacccagttgctgcgatgaaccccaccgccttatggcaacaacaacagctactgcgtatcaacccacttgctacgatgaaccctgccgctttcttgcagcaaccaatcattggttctggtcttttctagatcaattatgaattgtacttctataataaataaggaagaaggaaattgttgattg

SEQ ID NO: 1033 - DNA, 1545 bp, Setaria italica
  source 1..1545: mol_type = other DNA
cgacggtcggcgccgccaccgtggaccgggttttcccggtgagcgccacgcttggaaacggccaggtcctcaccggtcaatctctctacgcccaggcggccaaacaaacaccaatggtccggctgttgcccagcgactgcactggcaacgacctggtgccggacaggatcatgggcaagatcgtcgtgtgcagtagcaatttcggagtttctccaccatacggcgttgcagtgcagagggccggtggcagcgggctagtttccgttgccaccgtggagcagcatatggacgggctcatggtccaggcgttcacccttccggctgtcagcctcagcgcccgtgaagccgaaaagctcgcggcgtacatccactcggaaccttacccggtggcgtcgtttcgcttcacctgcagcacggtcaccggcgagaaccgcgcgccgatggtagcgaccttctcgtcgcgcggacccaaccaactcgtccgcgagatcctcaagccggacgtcatcgcgcccggcacgaacatcctcgccgcctggcccggcgagtcgcccctgacacgcgccgacggcgacacgagaagatcaagcttcaacatcatctcgggcacctccatggcgtgcccgcacgtcgccggcgtcgccgcgttgctgaagaagaagcaccccgactggactccggccatggttcggtcggcgctcatgacgacggcgacgatgctcgacagccacggcaggcccatcacggacaacgcccgccccggcggcagcacgacgccgatggcggccggggccgggcttgtccggccgcagctagcgctctacccgggcctggtctacgacgccgtggagcaggactacgtcgacttcttctgcaccatgaactacaccaccgcgcagatccggatgtttgtgccagacttcgccggctgcacgaggacgctccccggcggcgtcggcgacctcaactacccgtcgttcgttgtggacttcagcaacggcaccgacgtccgtgtcctgacacgcaacgtgacgagggtctcggagggtccggagatctacactgtcagggtcgtggtgccggacgagctggtggcggtgaccgtcacgccggcgacgcttgagttcggcgagctgaatgagacgaagagctacaaggtcgtgttccagagcaagaacagctcggctggtgcgcatggcgcgggtagtaagatgcagttcgggcacatcgtgtgggaaaacgacgcgcatcgagtgaggagccccgtcgtgttcacctggaactgaacctgacggcggcctgttctgtttcaggcgctgaataaagtcaggccagcgcagacgtgttcgttacttgttggtggtgtacttcacatctggtgtccagtaataaaaggttgcatatcactgtatctaaactgctcgagttcaacgtcatgagacgcagagttcaacatgaatgaaagttgtagtgctaaactgctaatatgataccttcttcgtgtccgtaaagttctagtgctaaggtaaaaaaaaaaaaaaaaac

SEQ ID NO: 1034 - DNA, 2934 bp, Setaria italica
  source 1..2934: mol_type = other DNA
atggccgccgcgccgccgctgtccgccgacgccctcagcttcctcccgtccgccgccgcccccgccgccgccgcgccgacgccggtcgtcgccgcggcgtggggcgcggcgagggcggcggggtcggtgagggggaaggcggcgctcaggatggcgagaagaggaagtggcctggctccggtggttgggaggaggccacgccggccgcccctctccgtgcggtgcgacgccaccagccgggacggaaggattacgcaacaagagtttacggagatggcatggcagtcaattgtctcatcacctgaggtggccaaggagagtaaacaccagattgtggagactgagcatctggtgaaatccttgctggagcaaaggaatgggcttgcccggaggatcttttctaaggcgggagtcgataacacaaagcttcttgatgctacggagaagttcatccagaggcagcctaaggtactaggtgaagatcctggttcaatgttggggcgtgacttggaagctctgatacaaagagcaagggactttaagaaagagtatggtgattcatatgtctcagttgaacatctagtcctcggcttcgccgaagataagcggtttggtaaacaactgttcaaggattttcagattaccgtgaagaccttgaaattggccattgaatcaatcagagggaaacaaaatgtaattgatcaagatcctgagggaaagtatgaagctttggagaagtatggaaaggatctgacagctatggcacgtcaagggaagcttgatccagttattggaagggatgatgaaattcgaagatgtatacagattttatcacggagaacaaagaacaacccagttttgattggtgaacctggtgtaggaaaaacggctatagctgaagggcttgctcagaggattgtacaaggagatgtcccacaagctctgaccaaccgtcgtctcattgcacttgatatgggtgctttgattgctggtgcaaaatatcgtggagaatttgaggataggctaaaggctgttctcaaagaagttacagattctgacggacagaccattctttttattgatgagattcatacagtcgttggagcaggtgccacaaatggtgcaatggatgctggtaatcttctcaaaccaatgcttgggagaggagagctacgttgtattggtgcaacaacacttgatgagtaccgcaaatatattgagaaagatccagcccttgagcggcgcttccaacaagtttatgttgatcagccttcagttgaagatacaatctcaatactacgaggactaagagagagatatgaactgcaccatggtgtacgcatatctgacagtgcccttgtggctgcagctgttctttcagaccgttatatcagtggacgattcttgcctgacaaagcaattgatctggttgatgaatcagctgccaagttgaaaatggagataacatcaaaacctactgctctggatgagattgatcgtgctgtcctgaagcttgagatggagcgtctctcacttacaaatgatacagacaaagcatcaaagggcagacgatcacgcattgaagcagaactatcactcttgaaggataaacaacgtgaattgactgagcagtgggagcatgagaagtcagtgatgactaaaattcaatctatcaaagaagagattgacagggtaaatgtggagatacagcaggcagaacgtgagtatgatctcaatcgcgctgctgaactgaagtatggaagtctgaatgccttgcagcgccagcttcagacaacagagaaggagctagatgaatatcagagttctgggaaatccatgctaagggaagaggtgactcaagatgatatagcagagatagtgagcaggtggacaggcattccagtctctaaactaaagcaatccgacagagagaagttgctgtatctggaggaagagctgcacaagcgtgttgttggtcaagatcctgcagtaaaagcagtctcagaggctattcagagatccagagctggtctgtctgacccaaaccgtcctattgccagtttcatgttcatgggacctacaggagttggcaaaactgagctagcgaaagcccttgctgcttttatgttcaacactgaggaagctgttgtaaggatcgacatgagtgagtacatggagaagcattcagtctcaagattgattggtgctccgccaggttacgttgggtatgaagagggtggtcagctaactgaggcagttcgccggaggccatattctgttgttttgttcgatgagattgagaaagctcattcagatgtcttcaatgttttccttcaaatattagatgatggtagggttaccgactcccaaggacggaaagtgagcttcaccaacactatcattatcatgacgtccaacgttgggtcgcagtacatactaaacatggacgaagaaggtggatcatctgattcagcctacgagaacataaagaagagggtgatggatgctgcaagatcagtattccgccctgagttcatgaatcgtatagatgagtacattgttttcaagcctcttgagagagaacagatcaacagcatcgtcaaattacagctggcaagagtacaaaagaggattgcagatcgcaagatcaagcttgaagtctcacctgcagcaatcgaattcctaggaagccttgggtatgacccgaactacggtgcaaggccagtgaagcgggtgattcaacagtacgtggagaacgaacttgcaaaaggcatcctcagaggtgatttcaaggacgaggacagcatcgtggtagacacccaggtcacagtgccatctaatggccagcttccgcagcaaaagcttgttttccgaaaggtcggtgagcaatcgaaggccgctgctgaagacgagaagttcttgccggctgtgtga

SEQ ID NO: 1035 - DNA, 1078 bp, Setaria italica
  source 1..1078: mol_type = other DNA
atggccgaccgcctcgccgccgccgccgccaccttccgcgcctcggccgtcgccgccccgtccgcccgccgtggcgcgcgggccagccgcgccttcttacccaactcgtcggcctcgccagctggcgcgcgcgtcggcctccgcgccgcgccatctcggctcccgcagaaggcgagggcggtgaggtgcgcggctgtggcggcggcgtccgacgcggcgcagctgaaggccgcccgcgaggacatcagggagcttctcaggacgacacattgccaccccatcctggtccgtctgggatggcatgatgctggtacgtatgacaagaatattgaggactggccacaacgaggaggagctaatggaagcttaagatttgatgttgagctgaaacatggagccaatgctggcctgataaatgctctaaagcttatccaaccaattaaggacaagtacccgggtatcacttatgcggatttatttcagttggcaagtgctacagcaattgaggaagctggtggcccaaagattccaatgacatatggacgggttgatgttacaggacctgagcagtgcccgccagaggggaagcttcctgatgctggcccaacttcacctgctgatcacttgagggaggtattctacagaatgggccttgatgacaaggacattgttgtcttgtctggagcacatacacttggaaggtccaggcctgaacggagtggctggggaaaaccagagacaaaatataccaaaaacggtcctggtgcacctggtgggcaatcatggacacctgagtggctgaaatttgataacagttacttcaaggagattaaagagaaaagagatcaggatcttctggtcctacctacagatgctgctttatttgaggacccagcgttcaaggtctatgcggagaaatatgcagcggaccaagacgcattctttaaagactacactgagtctcatgctaaactgagcaatctgggtgcaaagttcaatcctccacagggattctctctggatgattagtgctgcacctgagacagcccgtgaagcaggctcatactctcctagaaaa

SEQ ID NO: 1036 - DNA, 1437 bp, Setaria italica
  source 1..1437: mol_type = other DNA
atggcggagcgcctcgccgcctccctcctccccgccgcctccccctccccgtccgcccgccgcgccacggtcgcggcctcggggtccgccgccgcgtccttcccttcctcgtgctccgcccgagcggggctgcgcctccgctcctcccgctcggggtcggcccgcttctccaaggcggctgggcgcggcgggggaggcggcgcgctgcgggtggtccggtgcatggcggcgtcggacgcggcgcagctcaagagcgcgcgggaggacatcagggagcttctcaagaccacgtactgccaccccatcatggtccgtctggggtggcatgattctggtacctatgacaagaatattgaggagtggccccagcgaggtggagctgatggaagcttgagatttgaacctgagttgaatcatggagccaacgctggtctgattaatgccttgaagcttatccaacctatgaaggacaaatacccaggtatcacttatgcagatttgttccagttggcgagtgctacagcaattgaggaagctggtggcccaaaaattccaatgaaatacggacgggtggatgtcacagaacctgagcaatgtccacctgaggggaggcttcctgatgctggcccacgtgatcctgctgaacaccttagggaggtattctatagaatgggtcttgatgacaaggaaatcgttgcactgtctggagcacatacacttggaagagcaaggcctgaccggagtggctggggaaagccagaaacaaaatatactaaggatggccctggtgaacccggagggcaatcatggacagttgaatggttgaaatttgataacagttacttcaaggacatgaagtttctgagccagcttccatcgaaagagcagaaggatcaggatcttctagttttgcccactgatgccgcattatttgaggatccatctttcaaggtgtacgcagaaaagtacgcagaggaccaggaagccttctttaaagactatgctgaggctcatgctaaactgagcgaccttggtgcaaagtttgatcctcctgagggattctcactggacgatgacacaagcgatgagccagcagctgaaaagaaggaagaagctgcaccaacaccggaaccggcagctgcagcagcacctccgccagagccagcagcagcaccggcactggaaccagtagcagcagcagtagcaacagcgacagcggacgacaacaatggcgtggcgccacagccggagcccttcgtcgctgccaaatattcttatggaaagacggagctgtcggattcgatgaagcagaagatccgggcggagtacgaggggttcggaggcagcccggacaagcctctgcagtccaactacttcctcaacatcatgctcctcatcgcggggctggcgttcctgacgtctctggtcggcaactga

SEQ ID NO: 1037 - DNA, 936 bp, Setaria italica
  source 1..936: mol_type = other DNA
atggccgtccaccacctcctccgccgcggggtctccggcggcttcccgctccacccgctccgcggcctcctcgcctcccaggagctcgggcggcgtccgttgagctcggcggcaggggatgcggcggccgagctgaggggcgcgcgggaggacgtcaagcagctgctcaagaccacctcctgccatcccatcctggttcgattgggttggcatgatgctggtacctatgacaagaacattgctgagtggcccaagtgcggtggagctaatggtagcttgagatttgaaattgagttaaagcacggggctaatgctggtcttgtgaatgctttgaagctgatccaaccgatcaaggacaagttttcaggtgtcacatatgcagatctctttcagcttgccagcgccacagccattgaggaagcaggtggccccaaaattcccatgatctatggaagggttgacattactgcccctgaacaatgcccaccagaggggaggcttcctgctgccggtccaccttcacctgcggaacatttgcgtgaagtattctatagaatgggcctgaatgacaaggaaattgttgcactatcaggagctcatacgcttggacgggcaagaccagaacgtagtggctggggcaaaccagaaacaaaatacactaaaaatggacctggggcacctggggggcagtcttggacatctcagtggctaaagttcgacaatagctacttcaaggatgtcaaagaaaggcgggatgaggaccttctagttttgcctactgatgctgtgctgtttgaggattcctcattcaaggtctatgctgaaaaatatgctgaggaccaggatgcatttttcaaggactatgctgaagctcatgctaaattaagcaaccttggggcaaaatttgacccaccaaagggtatctctcttgagtag

SEQ ID NO: 1038 - DNA, 1812 bp, Setaria italica
  source 1..1812: mol_type = other DNA
atggaatccctagccgccgcctccgtgttctccccctcccgcgtcgccgccccggcggcgggggccctggttcgggcgggggcggtggtgtcggccgggatgaggaggaggagcggcaggagcggcggcatgaggtgccgcgccgtgacgccgctggcgagcgcggtgatgagcaggggcgccgtggcggcgaaggcggcggaggaggagaagaggcggttcttcgaggcggcggcgcgggggagcgggaagagcaacctggtgcccatgtgggagtgcatcgtgtccgaccacctcacccccgtgctcgcctaccgctgcctcgtcccggaggacaacgtcgacgcccccagcttcctcttcgagtccgtcgagcagggacctcagggcaccaccaacgtcggccgctacagcatggtgggagcccacccggtgatggagatagtggccaaggagcacaaggtcacgatcatggaccacgagaagggccaggtgacggagcaggtcgtggacgatcctatgcaggtgcccaggaacatgatggagggatggcacccacagcagatcgacgagctccctgaatccttcacaggcggatgggttgggttcttttcctatgatacggttcgttatgttgagaagaagaagctgccattctctggtgctccccaggacgacaggaatcttcctgatgtgcatttggggctctacgatgatgttcttgtcttcgataatgttgagaagaaagtgtatgtcatccattgggtaaatgtggaccggcacgcatcaattgaggcagcgtaccaagatggcagatctcggctggaccagttgctgtccaaagtgcacaattctaacgtccccacgctctctccaggatttgtgaagctgcacacccgccagtttggtacaccgttgaacaagtcaaccatgacaagtgatgagtacaagaatgctgttatgcaggctaaggagcatattatggctggggacatcttccagatcgttttgagtcagaggtttgagaggagaacatatgccaacccatttgaggtttatcgagctttacgaatagtgaaccctagcccatacatggcgtatgtacaggcaagaggctgtgtcctagttgcatctagccctgaaattcttacacgagtcagtaaggggaagattattaatcggccactagctggaactgttcgaaggggcaagacagagaaggaagatcaaatgcaagagcaacaactattaagtgatgaaaaacagtgtgctgagcacattatgcttgtagacttggggaggaatgatgttggcaaggtctccaaacctggatcagtaaaggtggaaaagttaatgaacattgagcgatactcccatgttatgcacatcagctccacggttagtggacagttggatgatcgtctccagagctgggatgccctgagagctgcattgcctgtgggaacagtcagtggtgcaccaaaggtgaaagccatggagttgatagacgagttggaagtcacaaggcgaggaccatatagtggtggtttaggagggatatcatttgatggcaacatgcaaatcgcacttgctctccgaaccattgtattctcaacggcaccaagccacaacacgatgtactcatacaaagctgctgataggcgtcgggagtgggttgctcatcttcaggctggagcgggcattgttgctgacagtagcccagatgatgaacagcgcgaatgcgagaataaggctgcagcattagctcgggctatcgatcttgcggagtcagcttttgtagacaaggaatag

SEQ ID NO: 1039 - DNA, 741 bp, Setaria italica
  source 1..741: mol_type = other DNA
atggcgtcgttgcacctgactgggccgcgggtggcggtggccgcgaagccggccgcgctgggcgggctccgcctgccgacgccgtcgattgccgtgccgacggggcggagggcccgggggctcgtggtgagggccgccaccgtcgtgtcacccaagtatacttccataaaaccattaggagacagagtacttgtgaaggtcaagaccaccgaggctaaaactgatggagggattttacttccagtatcagttcagtcaagaccaacaggaggggaagttgttgctgttggagaggggagaagttttggaagtaacagcatcgagatcagcgttccggttggtgcacaagttgtctactcgaaatacgccggcacggaattggaattcaatgacgccgaccatctcattttgaaagaagatgacatcattggtattctcgacagtgatgatgtgaaagatctgaagccgctgaatgatcgtattctgattaaggttgctgaagctgaagaacaaactgctggtggtttgctattgacgcaggcgaataaagagaaaccttctgttggaacagtggtagctgttggccccgggccgttgggcgaggacggcacaaggaaggccctgtcgatcactcctggaagcaacgtgatgtacagcaagtacgccggaagcgagttcaagggtcaggacggcgagtacatcgtgctcagggcatccgacgtgatggctgttctttcctaa

SEQ ID NO: 1040 - DNA, 822 bp, Setaria italica
  source 1..822: mol_type = other DNA
atgggggcactacccgtcgcccacaagctcgctctcacctcccccttcctcccgcgccaccgccgaccctgccccgccgcccaccaccacgggcagcgccggcggcgacatggagtggtggtggcgtacatggagccgaaccccaattcgccggcggccatcgcggggcgcctcgtcggggcgctccccgtggtgggcctcgttgcgcgcatcctgagtgacgagggcggcgtcggcggcgacatcatcgacttcgccgagttccgccgccgcgtcagcaagaagtgcaccgtcatggactcccaggccttctacgacttcaacgagcgccgcggcaagccgggggatcccttctacgtcctgctgtgctgctggctcgccgccgtcggcgccgggctactcaagacagaggagatcttggaaggcgtggcgcggctccgcatttccaacgacatcgagttcgaggaggagaccttcattgacatgatcaggacggcaaaggagaaacgagcaaagctgaaggctccagctccgcagataccgatggaaacgcgggcggagaaggcccttgaagccatctacgtctgctgcttcgggcaggacatggttgaggaagaggacgagaagcttctccgcacgatactgaacgctgtcttcccctccgtcgggaggccggcgatcgagaggatggtggcgtccatggccaagcaggtggcctccggcgagaggaagcgggacgggaggaccgtgtccaaggaagttcagcagcggcagctcaaggacctacagtttctcaaacagaacaagctggactctgcatga

SEQ ID NO: 1041 - DNA, 2850 bp, Setaria italica
  source 1..2850: mol_type = other DNA
atggaggtgtgctgctgctcgacctcgtcgtcgtcgtccgtcctcaccgtgggccacggcggcgccgcgcggatgctggcggcgccggcgggtcggtggggcgcggcggcggggttcgggagggcgatggtgctggcgcaccagctcccgctcccgcacccgctcccgcgccgggcgtcgtcctcgaggccgtccccgcggcgggcgcggaggggcctgatcatggcggtgttcgagcgcttcacggagcgggccgtcaaggcggtcgtgctgtcgcagcgggaggcccgggggctcggggaggccgccgtggcgccgcgccacctcttcctcggcctcgtcgcggaggaccgctcgtccggcgggtacctctcgtcggggattggcatcgagcgcgcgcgggaggagtgccgcggcatcggcgccagggacgtggacgcgccgccgccgccgccgcccaagaccggatcggggctcgacaccgacgtgcccttctccgcggccagcaagcaggtcttcgaggtcgccgtcgtgctgtcaaagaacatggggtccagcttcatctcgccggagcacctcgccatcgcgctcttcaccctcgacgatcccaccaccaacaacctcctcaggagtttgggagcagatccgagtcagctttcatcagttgcagtcgaccgtctccaagcagagcttgcgaaagatggaagagatcccgcaggagcatcatctttcaaaatcccagagaaggctcctgcagcagctggaagatctgctttctcccaatccttgactaaaaagaaagggaagggtgcactagatcagttttgtttggatttgaccacacaagctagtggaggtttcatcgatcctattattggccgtgaagaggagattgaaagagtggttcagataatatgccgacggacgaagaacaatcctattcttttgggtgaggcaggagttggcaaaactgcaattgctgagggactggctcttcgaattgcaaatggcgatgtccccatttatcttgtggcaaagcgtatattgtcactggatgttggtctacttatcgctggtgcaaaagagaggggtgaattggagtctagggttactaatataattcgtgaagtccgggaagcaggcgatgttattctttttattgatgaggttcacaatcttattggatctggaaccgttgggaagggtaagggttctagccttgatattggcaacttgctgaaacccgcgcttgctagaggtgaactgcagtgcattgcagcaacaactctagatgaacaccgaatgcattttgagaaggataaggctttggcccgccgcttccagccagtattagtagctgagcctagtcaggaagatgctgtgaagatattgcttggtcttcgtgagaaatacgaaacgtaccataaatgcagattcacattagaagccatcaatgcagcagtttatctatcagcaagatatatccctgacagacagcttcctgataaggctattgatctaattgacgaggctggaagtagagctcggatggagtcatttaacaggaagaaggaagggcagtcttcaattctcttgaagtcaccagatgaatattggcaagagataagagctgcacaggccatgcatgaagtggtgttatctaacaaggaaaaatattctccaaatgcgaatgatcaagagagtggtaatgctgatgttgaagcaccatatgaagacaatagagggtcaacatcaacctcatcactctcagctgatgagccaattgtagttgggacagaggaaattgcaagagttgcctcattatggtcagggataccagttcagcagttgactgctgatgataaaaagcttctagtaggactagatgatgagctcaggaaacgggtcattggccaagatgatgcagttgtggccatatctcgtgcagtgaagagatcgcgtgttggccttaatgaccctgacagacctattgctacactgcttttctgtggtccaacaggagttggtaaaacggagcttaccaaggctctagcagcaagttattttggatcagaatctgctatgcttagattagacatgagcgagtatatggagaggcacactgtgagcaagctgatcggctctcctccagggtacattggatatggtgaaactggtactttgacagaagcggtcaggaggaaaccatttactgtggttttgctggatgagatagagaaagcccaccctgatattttcaacatccttctccaaatctttgaggatggacatttgacagactcacagggccgcagggtttccttcaagaatacattgattgtgatgacgtccaatgttggttctacatcaatttcaaagggaagacggagcataggtttcttgaaggaagatactgagtcaagctcatatgtcgcaatgaaatccctagtaatggaagagctgaaggcatttttccgaccagagttgctcaacagaattgatgagatggtcgtgttccgtcctctagagaagactcagatgctggccattcttgatatcatcctgaaggaagtgaagggcaggcttttggcccttgggataggcttggaggtgtctgatgcaatgaaggacctgatctgccaagaggggtacgacaagagttacggtgcgcggccgctgcggagggctgtcacccacatgattgaggatgtcatcagcgaagcgattcttttcggcgaattcaagcccggcaacaccatactgatggacattgatgccgaggggaagccgtgcatgagccatctggaccaacagatcgtccaggtcactgacccaacacgggcattctga

SEQ ID NO: 1042 - DNA, 894 bp, Setaria italica
  source 1..894: mol_type = other DNA
atggagctccgcctctgccttcgtctccacgcgcgcctcccaccagccacgacgccgcccccgccgcctttcgcggcgcccgcggtgctccccgcgtcccgccgaattcggactggtgggagctacggggttgctcttcggcggcccacgaggcgttcgaatccggcgattcgcgcttccgaagccgacggcgcgccgggtgtggctgtgaaggagaggagcgtctcggtgatcctcttgtccggagggcagggaaagagaatgggggcaagtatgccgaagcagtatctgccactactgggactaccaattgcattgcacagtttgaaaacattctgtcaactgaaggaaatgaaagaagtcgtggtagtgtgtgacccagactatagtgatgtatttgaaggttctattgagaacttgcaaatacctcttaaatttgcatgcccaggaaaagagagacaggactctgtttttaatggacttcaggaaattgatggggattcggaacttgtttgtgtccatgattctgcaaggcccttagtttcttctgaagatgtaaaaaaggtcttacaagatgctgctgtgcatggggcagctgttcttggtgtgcctgtgaaagctacaataaaggaggctaatagtgattcttttgtcgtaaaaacccttgaccggaaaactctatgggaaatgcaaactccacaggttatgaagcctgatttactcaaagctggttttgagcttgttaaacgggatggccttgaagtcaccgatgatgtatccattgtagaatatctcaagcaccctgtctatattacggaaggctcttacacaaacattaaggtgaccactccggatgacatgcttctggctgagcgcctgatgagtgggaaatga

SEQ ID NO: 1043 - DNA, 2367 bp, Setaria italica
  source 1..2367: mol_type = other DNA
atggcgccggcgctgagcgggaccctgggcgcgtcgtcggtggcggcgctgcggccctgcgcggagaggagggcgccgtccgccgcgagctcggtcgctccgcgggggagcggggcggtgaggtgccccagaggggtcagatgggaggccgagaggagcagggggagattggtcacggtgaggtgcgacgcggccgtcgtggagaagcccgccggggaggaggcggccgaggagaagttcgagtaccaggcggaggtgagccgcttaatggacttgatcgtccacagcctgtacagtcacaaggaggtatttcttcgggagcttgtcagtaatgccagtgatgcattggataagttgaggtttcttggcgtgactgattctgctttacttgctgatggtggagagctggaaataaggattaagcctgaccctgatgctggaacaattactatcactgatactggtgttgggatgaccaaagatgagctcaaggattgccttggtacgattgctcagagtggcacctcaaaatttttgaaggccctcaaggagaacaaagaccttggggctgacaatggtctaattggtcagtttggtgttgggttttactcggcttttcttgtagcagagaaggttgtggtgtcaactaagagtccaaaatcagataaacagtatgtgtgggaagctgtggcggacagtagctcttatgtcatcaaggaagagactgaccctgagaagatgcttactcgtggaactcagattactctctttttaaggcctgatgacaagtatgagtttgctgacccttcaaggattcaaggcttagtgaagaactactctcagtttgtatcattccccatatacacgtggcaggagaaatcaagaactgttgaggttgaagaggatgaagagccaaaagaaggtgaagaggcaacagagggtgagaaactaaagaagaagaagactattactgagaaatactgggactgggagctggctaacgaaacaaaacccatttggatgagaaatccaaaggaaattgagaaaactgaatacaatgagttctataagaagacattcaatgagttcttggatcctcttgcccacactcacttcacaacagagggtgaggtggaattcaggagtgttctgtatgttccaggaatggcacccctcagtaatgacgagataatgaaccccaagaccaaaaatatccggctgtacgtcaaaagagtcttcatctctgatgactttgatggtgaactgtttccaagatacttgagctttgtgaaaggtgttgtagattcaaatgaccttcccctcaatgtttctcgtgagattcttcaagaaagtcgaattgtaaggattatgcgcaagcgacttgtcaggaagacatttgatatgattgaagagcttgctgaaaaagaagataaggaggactacaagaagttctgggaaagctttggcaagtttatcaagcttggttgcattgaggacacaggaaatcacaagcgccttgctccattgctgcgtttccactcttctaaaaatgagggtgatacgataagccttgaccaatatgtagagaacatgcctgagagtcaaaaggcgatatactacattgctacagatagtctccagagtgcaaagactgctcctttcttggaaaagctggtccagaaagacattgaagttctctaccttattgagccaatagatgaggttgctattcagaacttacagacctacaaagagaagaaatttgtggatatcagcaaagaggatctggaattgggtgacgaagaagaagaaaataaagaaacaaagcaggaattcacactcctgtgtgactgggtaaaacaacagcttggtgacaaggttgcgaaggtccaaatatcaaagcgtctaagttcatcaccgtgcgttcttgtatctggcaagtttggttggtctgccaacatggaaaggctcatgaaggcacaaacgcttggtgacacgtcaagcttggaatttatgagggggaggaggatttttgaaattaaccctgaccaccctattatcaaggatttgaacgctgcttgcaaaaatgagcctgaaagcacagaagctaagagggcggtcgagctgttgtatgaggctgctttgatctccagtggatatactcctgagagcccagcagagttgggtggcaagatctacgagatgatggcgattgcccttggtgggcgatgggggaggtctgacacagaggaagctgaagcaagtaatgatgaggccagcgtaggggcagacgcatctgaaggcactgtgacggaggtgattgagccttcagaagtaagacccgagagcgacccgtggagggattag

SEQ ID NO: 1044 - DNA, 1152 bp, Setaria italica
  source 1..1152: mol_type = other DNA
atgatttcgccgccgatgccgacgcatctcctcccgacgcggacgatctcccctcgctcaaatggctgcgcagcgacagcgagcccctctcccccctcgatggctgcgcggccgcggcgactcccttcagggcttcaatctgtgactggcagagggaagttttcactggcagccatcactcttgatgattatcttccaatgcgaagtactgaagtgaagaaccggacatcaacaggtgacatcacaagtctcagactaatcaccgcagtcaaaaccccctatctgccagatggaaggttcgatcttgaagcatatgattctctcataaacatgcagatagagggtggtgctgaaggtgtaattgttggaggaacaacaggagagggtcaccttatgagctgggatgaacatatcatgctcatcgggcatacagtgaactgctttggcactagaattaaagtgataggcaacacaggaagtaactcaaccagagaggctgttcacgcgacagagcagggatttgctgttggcatgcatgcagctctccacatcaatccttactatgggaagacctcaattgagggaatgatctctcattttgaggctgtcctcccaatgggtccgaccatcatctacaatgtgccatccaggactgcccaggatatcccccctgaagttatcatggcaatttcaggctatccaaacatggcaggtgtcaaggaatgtgttgggcatgagagggttaagcagtacactgacaaagatatagcagtatggagtggtaatgacgacgaatgccatgattctaggtggaaatatggtgctactggagtcatttccgtcgcaagcaaccttgttcctgggctcatgcacagcctcatgtacgaaggcgagaatgcgactctgaatgagaagcttttgccgctgatgaaatggttgttctgccagccaaatccgattgctctcaacactgctctggctcagcttggggtgacaaggcctgtcttcagattgccgtatgttcctcttcctctcaaaaagaggattgagttcgtccggattgttgaagctattggaaggcagaactttgtgggacagaaagaggcgcggattcttgatgatgatgatttcgtgttgatcagtaggtactag

SEQ ID NO: 1045 - DNA, 2020 bp, Setaria italica
  source 1..2020: mol_type = other DNA
aatgcagatgcagcagaccctcacgctgcggggcgtcccctccgcccgccgcgccgcgccgccgccggccagctccgcccacctcgggtcctctccctgcctgctgcgggtcccccgctcgctccgacgacggaggccccgctccctcagggcctccgcctcgctcgagcaggaggtcaaggaagtcgccgcctccccggctccctccgcagggaagagtactcaagcaactagaagggatgtgaggaatatagcaattgttgctcatgttgatcatgggaagacaactttggtggattcaatgttaaggcaagccaaggttttccgggataatcaagttgtgcaggaaagaataatggattccaatgatctggaaagagaaagaggaatcactattttgagcaagaatacatcaataacctataagggtactaaaatcaatataattgatactcctggacattcagatttcggcggggaggttgagcgtgttctcaacatggttgaaggagttcttctagtggttgattctgtagaggggcctatgccacagacaaggtttgttctgaagaaagctctagaatttggacatgcagttgttgtagttgtaaacaagattgacagaccagctgctcgtcctgagtttgtggtgaattcaacatttgaactatttattgagttaaatgcaactgatgaacagtgtgatttccaaacagtctatgcaagtggaattaaaggaaaggctgggttagatccagaaaatttggctgatgacctaggacccctttttgaggctattctaagatgcatcccagagccacgcattgagaaagatggtgccctgcaaatgcttgtatctaatactgaatacgatgagcacaaaggaaggatagcaattggacggttgcatgcaggggaacttcagcgtggcttggaagtcaaggtttgtacacctgatgatgcttgcagggtcggcaaaataagtgagctttttgtttatcagaacttcagccgtgttccagttgaatctgttggtgccggtgacatttgtgctgtatgtggaatgaatgatatcatgattggggaaactattgctgataaagttacaggaacaccattgcccactatcaaagtggaggagccaacagtcagaatgtctttctccatcaatacatcaccttttgttggaaaggaggggaaatatgttactagccgaaatctccgtgacaggttatatcgtgagcttgaaaggaatttggctatgaaagtagaagatggggagactgctgatacattccttgttagtggaagaggcacactgcatctcacaatattgatagagaacatgcggagagaaggatatgaatttatgattggacctccaaaggtcataaacaagacagtggatggaaaacaactagaaccttatgagatagctgctgttgaggttccagaggagtacatgggttcagttgttgagcttttggggaaaaggcgtggacaaatggttaacatggaagctagcgggccggagggaacaacattgctgaaatacaagattcctaccagaggcctcattggacttcggaatgcaattcttacagcttctcgtggcagagctatacttaacacaatttttgacagctatggcccatgggctggagatcttagctcacgcgatcagggatccttggttgcgtttgaagatggaagcactacttcttacgcacttcttaatgcgcaagaaagaggtttgctgtttgtccaacctggccaggatgtttacaaaggtcaaattgttggtatccatcagcgacctggtgatttagcaattaatgtgtgcaagaaaaaggctgctacaaatgttcgttccaacaaggaaactacagtggttcttgatgaacctttaagctacagtttggatgactgcatagagtttatccaagaagatgagctagtggaggttacccctgcaagcatccgcatgtgcaagaacccaaaaatttcgaagagaaagtag

SEQ ID NO: 1046 - DNA, 957 bp, Setaria italica
  source 1..957: mol_type = other DNA
atgcctccgactacgatggcttggacctccctcttcctccccaccaccgccggcgccaccgccgcggccaccggtagccgccacccctccttcagccaccgatcccactgccgcgttcccatgacgcgcctccgtcgcgcgccccggctcgtcgtttccgcttcagcctcaccggcctctcccgcgtcgtcgctcgacgcgctcatcttcgactgcgacggcgtcatactggagtcggagcacctccaccggcaggcctacaacgacgcgttcgcgcacttcggggtgcgctgcccgccggcctccgccgacccgctgtactgggacgaggccttctacgacgagctacagaaccgcatcggcggcgggaagcccaagatgcgatggtactttggggaaaatgggtggccttcttcaaatatcttcgagacaccaccttcgactgactccgataaggagaagttggtcgacataatccaggactggaaaacagagagatacaaagaaataataaaatctggaactgtggagcctagacctggtgttttgcggctgatggatgaagtaaagggtgcgggtatcaagcttgctgtttgctctgcagcaactaaaagttcagtgataatgtgccttgaaaaccttattggacttgagcgatttaagggcctggactgcttccttgcaggcgatgatgttaaactaaagaagcctgatccaacaatatatgttacagcagcagagaaattaggtgtgcaaagcaagaactgccttgtggtcgaggacagtgttattggattactagcggcaaaaggagcggggatgtcatgtataataacatatacaccttcaactgctagccaagatttcacggatgcaattgctacctatcctgaccttagtgatgtgaggctcgaggacctcaagctgttactccagaaaactcttgttactggatag

SEQ ID NO: 1047 - DNA, 1089 bp, Setaria italica
  source 1..1089: mol_type = other DNA
atggcacggtatcttctcgctcccaccaccaccgcctcctcctcctctgccctcctccccaaggatgccgccaagaacttgccgccgtcgcggaccctccgcctccgcgcgctcggctccaggtccggcaaggcgcgccccatcatggcggtagcgtcggagcaggcggccccggccgccggttaccccaaggtggccgcccccaccaccggcccgatccccgctgccgagctgctcggcgtcatcgaggccgccgcaaaagctggggccgatgttataatggaagctgttaataaaccacgcaatatccactataaaggtgttgcagacttggtgacagacacagataagttgagtgaatcagtaattttggaagttgtcatgaagaacttcaaaaaccacctcatacttggggaggaaggtggccttattggagattccttgtcagagtatctctggtgcattgaccctttagatggaacaacaaactttgcacatggttatccaagcttttctgtgtccattggggttctctttcgtggaaagcctgctgcttccacagtggtggaattttgtggtgggcctttttgctggagcacccgtacaatttctgcatctgctggtgggggagcttattgtaatgggcaaaaaattcatgttagtcaaacagacaaggtggagcaatctcttctcgtcacagggtttggatatgaacatgatgatgcctggacaaccaacattaatttgttcaaagagtttactgacattagcaggggagttcgaaggctagggtctgctgctgcggacatgtctcatgttggactgggcattacagaagcctactgggaataccggcttaagccatgggatatggctgctggtgtcctgatagttgaagaagctggtggggtggtaacacgcatggatggtggagcatttacagtcttcgaccgttctgttctggtctccaatggtgttgttcatggacagcttttggatcggattggccctcctactgaagatcttaagaagaaaggaattgatttctcgttgtggttcaagcccgacaagtacccaactgacttttga

SEQ ID NO: 1048 - DNA, 777 bp, Setaria italica
  source 1..777: mol_type = other DNA
atggcggcttccgctctccatctccgcctcctcccctcgccgccagccggtgtgaagctccagcagcggcgcctccgctcgagaatactgaggcagggtggtctgtctcgtagatattcaaaagtagtgtgctattacgggctcacaactccaccatataaactggatgctttggaaccttatatgagcaggaggacagttgaacttcactggggtaagcaccatcatgattatgtggagggattaaataagcagcttgctaccagcccactgtatggatacactctggaggagctgataaaagaagcgtacaacaatggcaatccattaccagagtataacaatgcagcacaggtctggaaccatcacttcttctgggaatcaatgcaaccagaaggcggtggcttacctgagggaggtgtgttgcagcagattgaaaaggattttggctcgtttaccaatttcagggaagaatttattcgctcagccttacaacttttggggtctggttgggtttggcttgtcttgaagagaaatgagagaaagctttcagtagttcatacacgaaatgctatctccccacttgcttttggcgatattccaattatcagcctagatttatgggagcatgcttactacttagactacaaggatgatatgctaacatatgttacaaactttatggaccatctcatctcttgggacactgtcactctgcgcatgatgcgtgctgagtcgtttgtgaaccttaatgagccaaatattccagtggcatga

SEQ ID NO: 1049 - DNA, 1194 bp, Setaria italica
  source 1..1194: mol_type = other DNA
atggcgtcaactgttgccttcagctcagttagcgcgcaggctgggctgatccaaaagccaaggaaccatggtgtcacaagccactatggtttaaaggcatcatcatcatctgttagctttggatttgagtcgtcattcctgggcaggaatgcatccctccgtgcctctgtcgctccaaggattgtgccgaaggcgacgtctgggtctcagatatctccccaggcatcttacaaagtggctgtacttggtgctgccggtgggattggacaacccctaggccttttgatcaagatgtctcctctcgtgtcagagctgcatctgtacgatattgcaaatgtcaagggtgttgctgcggatctgagccattgcaattcacctgctcaggttctggacttcactggcccctcggaattggcaaactgcttgaaaggggtggatgttgttgtcatccctgccggagtcccaaggaagccgggcatgactcgtgatgacctctttaacatcaatgcaagcattgtcaagtcgcttgttgaggctgttgcggacaattgcccagacgcgttcatccatatcatcagcaacccagtgaactccacagtgccaattgctgctgaggttctgaagcagaagggtgtctataaccccaagaagctttttggagttaccaccctggatgttgtcagggccaacacatttgtggcacagaagaagaacctgaagctcattgatgttgacgtcccagttgtcggcggtcatgctgggattacaatattgccgttattgtccaagaccaggccatctgttaccttcacagaagaggaaactgaggagctgacaaagaggatacagaatgccgggacagaggtggtggaggccaaggctggtgcagggtctgctaccctgtccatggcctatgctgctgcccgttttgtcgagtcatctctccgtgcactggctggtgatccagatgtctatgagtgcacatttatccagtctgagcttactgatctgccattctttgcatcaagagtcaagctcgggaagaatggtgtcgaatctgtttccgctgacctcgagggagtgactgagtacgaggccaaggcgcttgaggcactgaaggctgagctgaagggaagcattgagaagggcatcgcgttcgcaaacaaacagcaggaagctgccgcgtctgtttga

SEQ ID NO: 1050 - DNA, 132 bp, Setaria italica
  source 1..132: mol_type = other DNA
atggaagcggcggcgattgggtcgcagtccccgctctccttcccctccagcctctgcaaagcaaaagtatcctctggtttaccaatctgcaatgtgaaggtcaagaatcgcaggcttgaggtagtttgccat

SEQ ID NO: 1051 - DNA, 540 bp, Setaria italica
  source 1..540: mol_type = other DNA
atgctcccaatggccgtccaccccgccaccacgccggccctcgccccgcgcgctcgcgtcgccccgcccagaccttccacctccttggccgccgcctcgtcctcctcctgctctcgcatcgtcggtgtcaagaccaggaggctgccccttcgctcgctccgcagcgtcgccgccgccgccgctgccgacgccgtcgaggaagaggaggtgcaactaggtggggctgcggatgcgttgtacgaggaggaagcagaggagtatgaggtgaaggtgcccgaaagacaggatcctatgctggtactgaagttcatctggatggagaagaacatcggcatagcacttgaccaattggttcccggctatggcagcatcccgttaagcccgtactacttttggccacggaaagatgcttgggaggagctgagagcgaaactggaggagaaagagtggatctcgcagaagcagatgatcattcttctcaaccaggccactgacatcatcaacctatggcagcagggtggcgggagcctgtcgacatga

SEQ ID NO: 1052 - DNA, 522 bp, Setaria italica
  source 1..522: mol_type = other DNA
atggcccccaccgcgatggccgccacctccgtcgctccattccaggggctcaagtccaccgccggactccccgtcagccgccgctccaccagctccggcttcggcaacgtcagcaacggcgggaggatcaggtgcatgcaggtgtggccgattgggggcaagaagttcgagaccctctcctacctgccgcctctctcaaccgacgatctcctgaagcagatcgactacctgatccggaagaactggatcccttgcctcgagttcagcaaggttgggttcgtctaccgtgagaacaacaggtctcccggttactacgacggccgttactggaccatgtggaagctgcccatgttcggctgcaccgaggcaacccaggtgtacgctgagctcgaggagtgcaagaaggcctaccccgacgcctacatccgtatccttggcttcgacaacgtcaggcaggtgcagtgcatcatgttcatcgcctacaagcccccgggctgcgaggagaccggcgtcgccaaataa

SEQ ID NO: 1053 - DNA, 507 bp, Setaria italica
  source 1..507: mol_type = other DNA
atggcgcccaccgtgatggccgccgccacctccgtcgctccattccaggggctcaagtccaccgccggactccccgtcagccgccgcatcagtcgcagcaccggcttcgtcagcaacggcggaaggatcaggtgcatgcaggtgtggccggcggagggcaacaagaagttcgagaccctctcctacctgccacctctctccacggacgaggtcctaaagcagatcgactacctgatccggaagaactggatcccctgcctcgagttcagcaagatcgggttcgtctatcgtgagaacagcacgtctccctgttactacgacgggcgctactggaccatgtggaagctgcccatgttcggctgcaccgaggccacccaggtgtacgctgagttcgaggagtgcaagaaggcctaccccgactgttacatccgtatcatcggcttcgacaacatcaagcaggtgcagtgcgtcatgttcatcgcctacaagcccccaggctccgagtag

SEQ ID NO: 1054 - DNA, 507 bp, Setaria italica
  source 1..507: mol_type = other DNA
atggcgcccaccgtgatggcctcctcggccacctccgtggctccattccaggggctcaagtccaccgccggactccccgtcagccgccgcatcagtagcaccggcttcgtcagcaacggcggaaggatcaggtgcatgcaggtgtggccggcggagggcaacaagaagttcgagaccctctcctacctgccacctctctcaaccgaccagctcctgaagcaggtcgagtacctgatccggaacaactggatcccctgcctcgagttcagcaaggtcgggttcgtctttcgtgagaacagcaggtctccctgttactacgacgggcgctactggaccatgtggaagctgcccatgttcggctgcaccgaggccacccaggtgtacgctgagctcgaggagtgcaagaaggcctaccctgactgttacatccgtgtcatcggcttcgacaacctcaggcaggtgcaatgcgtcctgttcatcgcctacaagcccccgggcagcgagtag

SEQ ID NO: 1055 - DNA, 510 bp, Setaria italica
  source 1..510: mol_type = other DNA
atggcgcccaccgtgatggcctcgtcggccacctcagttgctccattccaggggctcaagtccaccgccggactccccgtcagccgccgcatcagtcgcagcaccggcttcgtcagcaacggtggtaggattaggtgtatgcaggtgtggccggcggagggcaacaagaagttcgagaccctctcctacctgccacctctctccacggacgaggtcctgaagcagatcgactacctgatccggaagaactggatcccctgccttgagttcagcaagatcgggttcgtctatcgtgagaacagcacgtctccctgttactacgacgggcgctactggaccatgtggaagctgcccatgttcggctgcaccgaggccacccaggtgtacgctgagttcgaggagtgcaagaaggcctaccccgactgttacatccgtatcatcggcttcgacaacatgaagcaggtgcagtgcgtcatgttcatcgcctacaagcccccgggcagcgagtag

SEQ ID NO: 1056 - DNA, 1536 bp, Setaria italica
  source 1..1536: mol_type = other DNA
atggcggccatggcgtccagggccgccgcggccaccgcgtcgctcgacctcgccgccgcgccggccctctcgcgccgctgccaccgcccgacctcggcgcgcccatccgccgccgccgccgccgcccgcggactgcggatgcgcggggcggcgcgggtggtggtggcggccgcggcggcggcggcggcaccggcgaaggccggcgcggaggaggtcgtgctgcagcccatcagggagatctccggcaccgtcaagctgcccgggtccaagtcgctctccaaccggatcctcctgctctccgccctagccgaggggacgacagtggttgacaacctgctggatagtgaggatgtccactacatgcttggggccttgaaggccctcgggctctccgttgaagcagacaaagctgccaaaagagctgtagttgctggctgtggcggcaagttcccagttgagaaggacgccaaagaggaagtgcagctcttcttggggaatgctggaacagcgatgcggccgttgacagcagccgtgactgctgctggtggaaatgcaacttatgtgcttgatggagtaccgagaatgagggagagacccattggcgacttggttgtcggattgaaacagctgggtgcggatgttgattgtttccttggcactgactgcccacctgttcgtgtcaaggggattggagggctacctggtggcaaggttaagctatctggctccatcagcagtcaatacttgagtgccttgttgatggctgctcctttagctcttggggacgtggagattgaaatcattgataaactaatctccattccctacgtcgacatgacattgagattgatggagcgttttggcgtgaaagcagagcattctgataactgggacaggttctatatcaagggaggccaaaagtacaagtcccctaagaatgcatatgtggaaggcgatgcctcaagtgcaagctatttcttggctggtgctgcaattaccggagggactgtgactgttgaagggtgtggcaccaccagtttgcagggtgatgtgaaatttgctgaggtactggagaagatgggagcgaaggttacatggactgagactagtgtaactgttaccggtccaccacgggagccatttgggaggaaacacctaaaagccattgatgtcaacatgaacaaaatgcctgatgtcgccatgacccttgctgttgttgcgctctttgctgacggcccaaccgctattagagatgtggcttcctggagagtgaaggagactgagaggatggttgcgatccggactgagctcactaagctcggagcatcagttgaggaaggtccggactactgcatcatcacgccaccggagaagctgaacgtgacggcgatcgacacctacgacgaccacaggatggccatggccttctccctcgccgcctgcgccgaggtgcccgtcacgatcagggaccccgggtgcacccgcaagaccttccccgactacttcgatgttctgagcacgttcgtcaagaactga

SEQ ID NO: 1057 - DNA, 1158 bp, Setaria italica
  source 1..1158: mol_type = other DNA
atggaggccgtcctacgacatccatcgctgtcccgcctcaagcctccgaacccgaaccctcacaggacgccaccgccatccctcgcctccccttctctcctccgcctccgcgagcgccggctcaccgtcgccgcggtgttccaggaccagaaaccgagagagccagcgagcaaggggggcgacgacgaggaggcgtacggcgaggtggaccgcatcgtctccagccgcacgatcaagaacccggtgttcgcagaggacgggtcggccaccacgtccgtcgccacggagtacctcgtggagtggaaggacgggcacgagccatcctggatccccgcggaggccatcgacgcggacgtggtggccgagtacgagacgccgtggtggacggcggcgaagaaggcggacgcggaggcgctggcggcgctgctcgcggacgagacgctgcggcgggaccccgacgcggaggacgcgcaggggcgcaccgcggcgcacttcgccgcggggctggggtccgaggagtgcctgcgcgcgctcgccgcggccggggcggacttgggccaccgggagcgcgcggggggagggctcacgccgctgcacatcgcggtcgggtacggccgcgcgggcgccgtgcgcgcgctgctggagctgggcgcggacccggaggcccccgacgggcagggccgcacgccgctggagctggtccaggaggtgctcgccaggacgcccaagggcaacccggcggcgttccagctgcggcaggggcttgaggcggcgcagaaggagctggagaaggccgtgtacgagtgggccgaggtggagaaggtgatcgacggccgcggcgaaggcaagtggcgggagtacctggtggagtggcgcgacggcggcgagagggagtgggtgagggcgccgtgggtggcggaggacctggtgagcgacttcgaggccgggctggagtacgccgtggcggaggccgtggtggacaagaggccggcggcggcggagggcggagaggagaaatgggagtaccttgtcaagtgggtggacattgaggaggcgacgtgggagcctgccgagaacgtggacgacgagctcgtgcaggagtttgagctgaggcaatcaggatccgctggtggcgatggcagcgccactgctccatga

SEQ ID NO: 1058 - DNA, 1803 bp, Setaria italica
  source 1..1803: mol_type = other DNA
atggcggccgccgccaccgccgcagccgcctcggcctccttccccgcggccgccgccctctgccgcgacggccgccggccctcccgcgtgagcgccgcggcgacgacgcccgcggaggcggcggcgctcgctgccgtcccggcgccgatggtgcgggtggtgccggagtcgctgcagcgggagagcgggtgcctcgtggcggggttccgggagcgaggcgcgggcgcggcggatggggatgggttcggggacgcggcgcctgggggaggaggagggcccggcgcgatggagtacctcaccagcgtgctgtcgtccaaggtgtacgacgtggcaatcgagtcgccgctgcagctcgccaccaagctctccgaccgcctcggggtcaacctctggatcaagcgcgaggacctgcagccggtattctcattcaagctgcgtggggcatataatatgatggcaaagctctcccctgagcagttggagaggggcgtcatctgctcatctgctggaaaccatgcccagggagttgctctttccgctcagagactgggatgtgatgccgtcatcgtcatgccggtgacaacaccagaaatcaagtggaaatcagtggagaggttgggtgcaacggtagtcctcgagggggactcatacgatgaagctcagtcatatgcaaaattacgatgtgagcaggaaggtcgcacattcatacctccatttgaccatcctgatgttatcactggacaaggaactgtcggcatggaaattgttcggcaactgcaaggtccactgcatgcaatatttgtacctgtgggaggtggtggattaatcgctggaattgctgcttatgtgaaacgggttcgcccagaggtgaaaataatcggagtagaaccctcagatgcaaatgcaatggcattgtcattgtgtcatggcaagagggtcatgttagagcatgttggtggttttgcagatggtgtagctgtcaaaactgtaggggaggaaacatttcgcctgtgcagagaactagtagatggcatcgttatggtcagtcgagatgctatttgtgcttctataaaggatatgtttgaggagaaaagaagtatccttgaacctgctggtgcccttgcattggcaggggctgaagcctactgcaaatactataacttgaaaggagaaactgttgttgcaataactagtggagcaaatatgaactttgaccgacttagactagtaactgaacttgctgatgttggtcgaaaacgggaagcagtgctagctacatttctgccagaggagcagggaagcttcaaaagattcacggaattggttggccggatgaatattactgaatttaaatacagatacgattctaacgctaaagatgcccttgttctttacagcgttggcatttacactgacaatgagcttggagcaatggtggatcgcatggaatctgcaaaactgaggactgttaaccttactgacaatgatttggcgaaggaccatcttagatactttattggaggcagatcagaaataaaagatgaacttgtttaccggttcatttttccagaaaggcctggggccctcatgaaatttttggatgcattcagtccttgttggaatatcagccttttccattatcgtgcacagggtgaagctggagcaaatgtattagttggcatacaagtgccaccaaaagacttcgatgaattcaagagtcgtgctgagagtcttgggtacgagtacatgtcagagcacaacaatgagatataccgactgctgttgcgtgatccaaagatttaa

SEQ ID NO: 1059 - DNA, 2055 bp, Setaria italica
  source 1..2055: mol_type = other DNA
atgtcggaggccgaccgggtacgcctccgcgcggcggcgctggcgctgcaggacgatggggtaagggacaagccagacgccaaggcgaacgtcttcgcggatcttggctcgccggtgtcgccgctccgaccgcgggcgagcgtggcgacgtcgtcgtcctcgtcgtccgggtcggccaagtcgccggtgccgtcgaatgctgggatggcgggtgggaggaggcactccggcgagctgatggcggagtgcaacccgccacggatgacggggcaccggcggtgcggatctgggccgttgatattctccggcggcagcagcgggggaagcggcggcggcggcggggaccgtgggagcacggcgagctcgccgatgctgaatgcgctccccgccgggaacatctgttcgtccgggcgcgtcccggcggcggcggcggcgccgcctccgccgcgctcccgtccggacgtgctcggatccggcaccggccactacggccacgggagcatcatgcgcggcgcgggcatggcccccgccaggagcagcattgatgccccttcgttcctcgggcactcctcgaggtcgccggcgagctccccggcaagcggcggcggcgggagcctccaggaggtgacccgcttggggaacgagtggtacaagaagggcaagtacgcggaggcgctccgctactacgagcgcgccgtgtcgctttgccccgagagcgccgcgtgtcgcggcaaccgagccgccgcgctcataggacttggccggctcgccgacgcgctccgcgaatgcgaggaggccgtccggctcgacccggccagcggtcgcgcccacagccgcctcgccggcgtctgcctgcggttggggatgattgataaggcccggaggaacttcacccaggcaggtcatcttcagcagtctgatcccgctgagtggcagaagctgcaggaggtggagatgcatctgggaagaagcactgatgcacggaaaattggggattggaagagtgcactgagggaagctgatgctgccattgcctctggcgctgactcctctcagttgcttcttgccttgagatcagaagcactcctccgacttcacaagctggatgaggctgagtcgactcttgcaagtttgctgaaattggatggcacattgccctcatcattgacagcagcgaaactctcaggcatgctcgctgagtcctatgtacatattgtccgagcccaagttgacatggctttggggaggtttgatactgctgttgctgcagctgaaaaggctagagatcttgatcctgggaatgcagaagtggggatgattctgaataatgtgagactagttgcaaaagcccgagcccaaggaaatgatctctttaaggttggcaagttttcagatgcatcaatagcctatggtgaagggctcaagtatgatccctcaaattcagtgcttcactgcaatcgagctgcttgctggtcaaagctagaaaagtgggagaaagctgttgacgactgcaatgaggctctaagaatacaaccaaattatacaaaggctctcttaaggagggctgcgtcctacgctaagcttgagcgttgggctgattgcgtgcgggattatgaggtgcttcggaaagagcttcctagcgataaggaggttgcagaagctctgttccatgcccaaattgctttgaaggcgactcgtggtgaggatgtgtcaaatatgaagtttggaggagaggtagagatagtaaccaatgtagagcaactccatgctgccataggctcaccaggggtatctgttgtctacttcatgtcggcaatgaaccagcaatgcacacaaatcacaccttcggtgaacactctctgcactgaatgcccctcagtaaattttctgaaggtaaatgtcgacagcagccctctggtggcaaaggcagagaacgtgcggattgtcccgacattcaagatatacaaagacgggatgaaagtgaaggagatgatctgcccgactttacatgttctgcgctacaccgtgcgtcactattctgtatccagttcttga

SEQ ID NO: 1060 - DNA, 1818 bp, Setaria italica
  source 1..1818: mol_type = other DNA
atggcggctctggccacttcccagctcgtcaccacccgcgccggcttcggcctcggcgacgcctcctcctccatgttccgccccggcgtccagggcctcaggggctcccgggcctcctccccggcggccacgctcagcgtgcggaccagcgcgcgcgccgcgcccaggcagcagcaccgccgggcgcagcgcggcgccaggttcccctccctcgtcgtctgcgccaccgccggcatgaacgtcgtcttcgtcggcgccgagatggcgccttggagcaagaccggcggactcggcgacgtcctcggcggcctcccgccggccatggccgcgaatgggcaccgggtcatggtcatctccccccgctacgaccagtacaaggacgcctgggacaccagcgtcgtctccgagatcaaggtgggagacaggtacgagagggtgaggttcttccactgctacaagcgcggagtcgaccgcgtgttcatcgaccacccgtccttcctggagagggtttggggaaagactggtgagaagatctacgggccagacgctggagtggattacaaggacaaccagctgcgtttcagccttctttgccaggcagcacttgaagctcctaggattctgagcctcaacaacaacccttacttctcaggaccgtacggggaggacgtcgtgttcgtctgcaacgactggcacaccggccctctgtcgagctacctcaagagcaactaccagtccaacggcatctacagaaacgccaagaccgctttctgcatccacaacatctcctaccagggccggttcgcattctcggactacccggagctaaacctccctgagagattcagatcatccttcgatttcatcgacggctacgagaagcctgtggagggcaggaagatcaactggatgaaggccgggatcatcgaagccgacagggtcctgaccgtgagcccctactacgccgaggagctcatctccggcatcgccaggggctgcgagctcgacaacatcatgcgcctcaccggcatcaccggtatcgtcaacggcatggacgtcagcgagtgggaccccagcaaggacaagtacatcgccaccaagtacgacgtgtcaacggccattgcggccaaggcgctcaacaaggaggcgctgcaggccgcggccgggctcccggtggaccggaagatcccgctggtggcgttcgtcggcaggctggaggagcagaagggccccgacgtcatggctgccgccatcccgcagctcatggaggaggatgtccagatcgtccttctgggcactgggaagaagaagttcgagcgcatgctgatgagcgcggaggagaagtaccccgacaaggtgcgcgccgtggtgaagttcaacgcggcgctggcgcaccacatcatggccggcgccgacctgctcgccgtcaccagccgcttcgagccctgcggcctcatccagctgcaggggatgcgatacggcacgccctgcgtgtgcgcgtccaccggcgggctcgtcgacaccgtcatcgaaggcaagaccggattccacatgggccgcctcagcgtcgactgtaaggtcgtggagccggccgacgtgcagaaggtggcgagcaccctgaagcgcgccatcaaggtcgtcggcacgccggcgtacgaggagatggtcaggaactgcatgatccaggacctctcctggaagggccctgccaagaactgggagaacgttctgctgagcctgggcgtcgccggcagccagccggggatcgaaggcgaggagatcgcgccgctcgccaaggagaacgtggccgctccctga

SEQ ID NO: 1061 - protein, 977 aa, Setaria italica
MAAAPPLSADALSFLPSAAAPAAAAPTPVVAAAWGAARAAGSVRGKAALRMARRGSGLAPVVGRRPRRPPLSVRCDATSRDGRITQQEFTEMAWQSIVSSPEVAKESKHQIVETEHLVKSLLEQRNGLARRIFSKAGVDNTKLLDATEKFIQRQPKVLGEDPGSMLGRDLEALIQRARDFKKEYGDSYVSVEHLVLGFAEDKRFGKQLFKDFQITVKTLKLAIESIRGKQNVIDQDPEGKYEALEKYGKDLTAMARQGKLDPVIGRDDEIRRCIQILSRRTKNNPVLIGEPGVGKTAIAEGLAQRIVQGDVPQALTNRRLIALDMGALIAGAKYRGEFEDRLKAVLKEVTDSDGQTILFIDEIHTVVGAGATNGAMDAGNLLKPMLGRGELRCIGATTLDEYRKYIEKDPALERRFQQVYVDQPSVEDTISILRGLRERYELHHGVRISDSALVAAAVLSDRYISGRFLPDKAIDLVDESAAKLKMEITSKPTALDEIDRAVLKLEMERLSLTNDTDKASKGRRSRIEAELSLLKDKQRELTEQWEHEKSVMTKIQSIKEEIDRVNVEIQQAEREYDLNRAAELKYGSLNALQRQLQTTEKELDEYQSSGKSMLREEVTQDDIAEIVSRWTGIPVSKLKQSDREKLLYLEEELHKRVVGQDPAVKAVSEAIQRSRAGLSDPNRPIASFMFMGPTGVGKTELAKALAAFMFNTEEAVVRIDMSEYMEKHSVSRLIGAPPGYVGYEEGGQLTEAVRRRPYSVVLFDEIEKAHSDVFNVFLQILDDGRVTDSQGRKVSFTNTIIIMTSNVGSQYILNMDEEGGSSDSAYENIKKRVMDAARSVFRPEFMNRIDEYIVFKPLEREQINSIVKLQLARVQKRIADRKIKLEVSPAAIEFLGSLGYDPNYGARPVKRVIQQYVENELAKGILRGDFKDEDSIVVDTQVTVPSNGQLPQQKLVFRKVGEQSKAAAEDEKFLPAV

SEQ ID NO: 1062 - protein, 342 aa, Setaria italica
MADRLAAAAATFRASAVAAPSARRGARASRAFLPNSSASPAGARVGLRAAPSRLPQKARAVRCAAVAAASDAAQLKAAREDIRELLRTTHCHPILVRLGWHDAGTYDKNIEDWPQRGGANGSLRFDVELKHGANAGLINALKLIQPIKDKYPGITYADLFQLASATAIEEAGGPKIPMTYGRVDVTGPEQCPPEGKLPDAGPTSPADHLREVFYRMGLDDKDIVVLSGAHTLGRSRPERSGWGKPETKYTKNGPGAPGGQSWTPEWLKFDNSYFKEIKEKRDQDLLVLPTDAALFEDPAFKVYAEKYAADQDAFFKDYTESHAKLSNLGAKFNPPQGFSLDD

SEQ ID NO: 1063 - protein, 478 aa, Setaria italica
MAERLAASLLPAASPSPSARRATVAASGSAAASFPSSCSARAGLRLRSSRSGSARFSKAAGRGGGGGALRVVRCMAASDAAQLKSAREDIRELLKTTYCHPIMVRLGWHDSGTYDKNIEEWPQRGGADGSLRFEPELNHGANAGLINALKLIQPMKDKYPGITYADLFQLASATAIEEAGGPKIPMKYGRVDVTEPEQCPPEGRLPDAGPRDPAEHLREVFYRMGLDDKEIVALSGAHTLGRARPDRSGWGKPETKYTKDGPGEPGGQSWTVEWLKFDNSYFKDMKFLSQLPSKEQKDQDLLVLPTDAALFEDPSFKVYAEKYAEDQEAFFKDYAEAHAKLSDLGAKFDPPEGFSLDDDTSDEPAAEKKEEAAPTPEPAAAAAPPPEPAAAPALEPVAAAVATATADDNNGVAPQPEPFVAAKYSYGKTELSDSMKQKIRAEYEGFGGSPDKPLQSNYFLNIMLLIAGLAFLTSLVGN

SEQ ID NO: 1064 - protein, 311 aa, Setaria italica
MAVHHLLRRGVSGGFPLHPLRGLLASQELGRRPLSSAAGDAAAELRGAREDVKQLLKTTSCHPILVRLGWHDAGTYDKNIAEWPKCGGANGSLRFEIELKHGANAGLVNALKLIQPIKDKFSGVTYADLFQLASATAIEEAGGPKIPMIYGRVDITAPEQCPPEGRLPAAGPPSPAEHLREVFYRMGLNDKEIVALSGAHTLGRARPERSGWGKPETKYTKNGPGAPGGQSWTSQWLKFDNSYFKDVKERRDEDLLVLPTDAVLFEDSSFKVYAEKYAEDQDAFFKDYAEAHAKLSNLGAKFDPPKGISLE

SEQ ID NO: 1065 - protein, 603 aa, Setaria italica
MESLAAASVFSPSRVAAPAAGALVRAGAVVSAGMRRRSGRSGGMRCRAVTPLASAVMSRGAVAAKAAEEEKRRFFEAAARGSGKSNLVPMWECIVSDHLTPVLAYRCLVPEDNVDAPSFLFESVEQGPQGTTNVGRYSMVGAHPVMEIVAKEHKVTIMDHEKGQVTEQVVDDPMQVPRNMMEGWHPQQIDELPESFTGGWVGFFSYDTVRYVEKKKLPFSGAPQDDRNLPDVHLGLYDDVLVFDNVEKKVYVIHWVNVDRHASIEAAYQDGRSRLDQLLSKVHNSNVPTLSPGFVKLHTRQFGTPLNKSTMTSDEYKNAVMQAKEHIMAGDIFQIVLSQRFERRTYANPFEVYRALRIVNPSPYMAYVQARGCVLVASSPEILTRVSKGKIINRPLAGTVRRGKTEKEDQMQEQQLLSDEKQCAEHIMLVDLGRNDVGKVSKPGSVKVEKLMNIERYSHVMHISSTVSGQLDDRLQSWDALRAALPVGTVSGAPKVKAMELIDELEVTRRGPYSGGLGGISFDGNMQIALALRTIVFSTAPSHNTMYSYKAADRRREWVAHLQAGAGIVADSSPDDEQRECENKAAALARAIDLAESAFVDKE

SEQ ID NO: 1066 - protein, 246 aa, Setaria italica
MASLHLTGPRVAVAAKPAALGGLRLPTPSIAVPTGRRARGLVVRAATVVSPKYTSIKPLGDRVLVKVKTTEAKTDGGILLPVSVQSRPTGGEVVAVGEGRSFGSNSIEISVPVGAQVVYSKYAGTELEFNDADHLILKEDDIIGILDSDDVKDLKPLNDRILIKVAEAEEQTAGGLLLTQANKEKPSVGTVVAVGPGPLGEDGTRKALSITPGSNVMYSKYAGSEFKGQDGEYIVLRASDVMAVLS

SEQ ID NO: 1067 - protein, 273 aa, Setaria italica
MGALPVAHKLALTSPFLPRHRRPCPAAHHHGQRRRRHGVVVAYMEPNPNSPAAIAGRLVGALPVVGLVARILSDEGGVGGDIIDFAEFRRRVSKKCTVMDSQAFYDFNERRGKPGDPFYVLLCCWLAAVGAGLLKTEEILEGVARLRISNDIEFEEETFIDMIRTAKEKRAKLKAPAPQIPMETRAEKALEAIYVCCFGQDMVEEEDEKLLRTILNAVFPSVGRPAIERMVASMAKQVASGERKRDGRTVSKEVQQRQLKDLQFLKQNKLDSA

SEQ ID NO: 1068 - protein, 949 aa, Setaria italica
MEVCCCSTSSSSSVLTVGHGGAARMLAAPAGRWGAAAGFGRAMVLAHQLPLPHPLPRRASSSRPSPRRARRGLIMAVFERFTERAVKAVVLSQREARGLGEAAVAPRHLFLGLVAEDRSSGGYLSSGIGIERAREECRGIGARDVDAPPPPPPKTGSGLDTDVPFSAASKQVFEVAVVLSKNMGSSFISPEHLAIALFTLDDPTTNNLLRSLGADPSQLSSVAVDRLQAELAKDGRDPAGASSFKIPEKAPAAAGRSAFSQSLTKKKGKGALDQFCLDLTTQASGGFIDPIIGREEEIERVVQIICRRTKNNPILLGEAGVGKTAIAEGLALRIANGDVPIYLVAKRILSLDVGLLIAGAKERGELESRVTNIIREVREAGDVILFIDEVHNLIGSGTVGKGKGSSLDIGNLLKPALARGELQCIAATTLDEHRMHFEKDKALARRFQPVLVAEPSQEDAVKILLGLREKYETYHKCRFTLEAINAAVYLSARYIPDRQLPDKAIDLIDEAGSRARMESFNRKKEGQSSILLKSPDEYWQEIRAAQAMHEVVLSNKEKYSPNANDQESGNADVEAPYEDNRGSTSTSSLSADEPIVVGTEEIARVASLWSGIPVQQLTADDKKLLVGLDDELRKRVIGQDDAVVAISRAVKRSRVGLNDPDRPIATLLFCGPTGVGKTELTKALAASYFGSESAMLRLDMSEYMERHTVSKLIGSPPGYIGYGETGTLTEAVRRKPFTVVLLDEIEKAHPDIFNILLQIFEDGHLTDSQGRRVSFKNTLIVMTSNVGSTSISKGRRSIGFLKEDTESSSYVAMKSLVMEELKAFFRPELLNRIDEMVVFRPLEKTQMLAILDIILKEVKGRLLALGIGLEVSDAMKDLICQEGYDKSYGARPLRRAVTHMIEDVISEAILFGEFKPGNTILMDIDAEGKPCMSHLDQQIVQVTDPTRAF

SEQ ID NO: 1069 - protein, 297 aa, Setaria italica
MELRLCLRLHARLPPATTPPPPPFAAPAVLPASRRIRTGGSYGVALRRPTRRSNPAIRASEADGAPGVAVKERSVSVILLSGGQGKRMGASMPKQYLPLLGLPIALHSLKTFCQLKEMKEVVVVCDPDYSDVFEGSIENLQIPLKFACPGKERQDSVFNGLQEIDGDSELVCVHDSARPLVSSEDVKKVLQDAAVHGAAVLGVPVKATIKEANSDSFVVKTLDRKTLWEMQTPQVMKPDLLKAGFELVKRDGLEVTDDVSIVEYLKHPVYITEGSYTNIKVTTPDDMLLAERLMSGK

SEQ ID NO: 1070 - protein, 788 aa, Setaria italica
MAPALSGTLGASSVAALRPCAERRAPSAASSVAPRGSGAVRCPRGVRWEAERSRGRLVTVRCDAAVVEKPAGEEAAEEKFEYQAEVSRLMDLIVHSLYSHKEVFLRELVSNASDALDKLRFLGVTDSALLADGGELEIRIKPDPDAGTITITDTGVGMTKDELKDCLGTIAQSGTSKFLKALKENKDLGADNGLIGQFGVGFYSAFLVAEKVVVSTKSPKSDKQYVWEAVADSSSYVIKEETDPEKMLTRGTQITLFLRPDDKYEFADPSRIQGLVKNYSQFVSFPIYTWQEKSRTVEVEEDEEPKEGEEATEGEKLKKKKTITEKYWDWELANETKPIWMRNPKEIEKTEYNEFYKKTFNEFLDPLAHTHFTTEGEVEFRSVLYVPGMAPLSNDEIMNPKTKNIRLYVKRVFISDDFDGELFPRYLSFVKGVVDSNDLPLNVSREILQESRIVRIMRKRLVRKTFDMIEELAEKEDKEDYKKFWESFGKFIKLGCIEDTGNHKRLAPLLRFHSSKNEGDTISLDQYVENMPESQKAIYYIATDSLQSAKTAPFLEKLVQKDIEVLYLIEPIDEVAIQNLQTYKEKKFVDISKEDLELGDEEEENKETKQEFTLLCDWVKQQLGDKVAKVQISKRLSSSPCVLVSGKFGWSANMERLMKAQTLGDTSSLEFMRGRRIFEINPDHPIIKDLNAACKNEPESTEAKRAVELLYEAALISSGYTPESPAELGGKIYEMMAIALGGRWGRSDTEEAEASNDEASVGADASEGTVTEVIEPSEVRPESDPWRD

SEQ ID NO: 1071 - protein, 383 aa, Setaria italica
MISPPMPTHLLPTRTISPRSNGCAATASPSPPSMAARPRRLPSGLQSVTGRGKFSLAAITLDDYLPMRSTEVKNRTSTGDITSLRLITAVKTPYLPDGRFDLEAYDSLINMQIEGGAEGVIVGGTTGEGHLMSWDEHIMLIGHTVNCFGTRIKVIGNTGSNSTREAVHATEQGFAVGMHAALHINPYYGKTSIEGMISHFEAVLPMGPTIIYNVPSRTAQDIPPEVIMAISGYPNMAGVKECVGHERVKQYTDKDIAVWSGNDDECHDSRWKYGATGVISVASNLVPGLMHSLMYEGENATLNEKLLPLMKWLFCQPNPIALNTALAQLGVTRPVFRLPYVPLPLKKRIEFVRIVEAIGRQNFVGQKEARILDDDDFVLISRY

SEQ ID NO: 1072 - protein, 672 aa, Setaria italica
MQMQQTLTLRGVPSARRAAPPPASSAHLGSSPCLLRVPRSLRRRRPRSLRASASLEQEVKEVAASPAPSAGKSTQATRRDVRNIAIVAHVDHGKTTLVDSMLRQAKVFRDNQVVQERIMDSNDLERERGITILSKNTSITYKGTKINIIDTPGHSDFGGEVERVLNMVEGVLLVVDSVEGPMPQTRFVLKKALEFGHAVVVVVNKIDRPAARPEFVVNSTFELFIELNATDEQCDFQTVYASGIKGKAGLDPENLADDLGPLFEAILRCIPEPRIEKDGALQMLVSNTEYDEHKGRIAIGRLHAGELQRGLEVKVCTPDDACRVGKISELFVYQNFSRVPVESVGAGDICAVCGMNDIMIGETIADKVTGTPLPTIKVEEPTVRMSFSINTSPFVGKEGKYVTSRNLRDRLYRELERNLAMKVEDGETADTFLVSGRGTLHLTILIENMRREGYEFMIGPPKVINKTVDGKQLEPYEIAAVEVPEEYMGSVVELLGKRRGQMVNMEASGPEGTTLLKYKIPTRGLIGLRNAILTASRGRAILNTIFDSYGPWAGDLSSRDQGSLVAFEDGSTTSYALLNAQERGLLFVQPGQDVYKGQIVGIHQRPGDLAINVCKKKAATNVRSNKETTVVLDEPLSYSLDDCIEFIQEDELVEVTPASIRMCKNPKISKRK

SEQ ID NO: 1073 - protein, 318 aa, Setaria italica
MPPTTMAWTSLFLPTTAGATAAATGSRHPSFSHRSHCRVPMTRLRRAPRLVVSASASPASPASSLDALIFDCDGVILESEHLHRQAYNDAFAHFGVRCPPASADPLYWDEAFYDELQNRIGGGKPKMRWYFGENGWPSSNIFETPPSTDSDKEKLVDIIQDWKTERYKEIIKSGTVEPRPGVLRLMDEVKGAGIKLAVCSAATKSSVIMCLENLIGLERFKGLDCFLAGDDVKLKKPDPTIYVTAAEKLGVQSKNCLVVEDSVIGLLAAKGAGMSCIITYTPSTASQDFTDAIATYPDLSDVRLEDLKLLLQKTLVTG

SEQ ID NO: 1074 - protein, 362 aa, Setaria italica
MARYLLAPTTTASSSSALLPKDAAKNLPPSRTLRLRALGSRSGKARPIMAVASEQAAPAAGYPKVAAPTTGPIPAAELLGVIEAAAKAGADVIMEAVNKPRNIHYKGVADLVTDTDKLSESVILEVVMKNFKNHLILGEEGGLIGDSLSEYLWCIDPLDGTTNFAHGYPSFSVSIGVLFRGKPAASTVVEFCGGPFCWSTRTISASAGGGAYCNGQKIHVSQTDKVEQSLLVTGFGYEHDDAWTTNINLFKEFTDISRGVRRLGSAAADMSHVGLGITEAYWEYRLKPWDMAAGVLIVEEAGGVVTRMDGGAFTVFDRSVLVSNGVVHGQLLDRIGPPTEDLKKKGIDFSLWFKPDKYPTDF

SEQ ID NO: 1075 - protein, 258 aa, Setaria italica
MAASALHLRLLPSPPAGVKLQQRRLRSRILRQGGLSRRYSKVVCYYGLTTPPYKLDALEPYMSRRTVELHWGKHHHDYVEGLNKQLATSPLYGYTLEELIKEAYNNGNPLPEYNNAAQVWNHHFFWESMQPEGGGLPEGGVLQQIEKDFGSFTNFREEFIRSALQLLGSGWVWLVLKRNERKLSVVHTRNAISPLAFGDIPIISLDLWEHAYYLDYKDDMLTYVTNFMDHLISWDTVTLRMMRAESFVNLNEPNIPVA

SEQ ID NO: 1076 - protein, 397 aa, Setaria italica
MASTVAFSSVSAQAGLIQKPRNHGVTSHYGLKASSSSVSFGFESSFLGRNASLRASVAPRIVPKATSGSQISPQASYKVAVLGAAGGIGQPLGLLIKMSPLVSELHLYDIANVKGVAADLSHCNSPAQVLDFTGPSELANCLKGVDVVVIPAGVPRKPGMTRDDLFNINASIVKSLVEAVADNCPDAFIHIISNPVNSTVPIAAEVLKQKGVYNPKKLFGVTTLDVVRANTFVAQKKNLKLIDVDVPVVGGHAGITILPLLSKTRPSVTFTEEETEELTKRIQNAGTEVVEAKAGAGSATLSMAYAAARFVESSLRALAGDPDVYECTFIQSELTDLPFFASRVKLGKNGVESVSADLEGVTEYEAKALEALKAELKGSIEKGIAFANKQQEAAASV

SEQ ID NO: 1077 - protein, 44 aa, Setaria italica; identical to SEQ ID NO: 340

SEQ ID NO: 1078 - protein, 179 aa, Setaria italica
MLPMAVHPATTPALAPRARVAPPRPSTSLAAASSSSCSRIVGVKTRRLPLRSLRSVAAAAAADAVEEEEVQLGGAADALYEEEAEEYEVKVPERQDPMLVLKFIWMEKNIGIALDQLVPGYGSIPLSPYYFWPRKDAWEELRAKLEEKEWISQKQMIILLNQATDIINLWQQGGGSLST

SEQ ID NO: 1079 - protein, 173 aa, Setaria italica
MAPTAMAATSVAPFQGLKSTAGLPVSRRSTSSGFGNVSNGGRIRCMQVWPIGGKKFETLSYLPPLSTDDLLKQIDYLIRKNWIPCLEFSKVGFVYRENNRSPGYYDGRYWTMWKLPMFGCTEATQVYAELEECKKAYPDAYIRILGFDNVRQVQCIMFIAYKPPGCEETGVAK

SEQ ID NO: 1080 - protein, 168 aa, Setaria italica
MAPTVMAAATSVAPFQGLKSTAGLPVSRRISRSTGFVSNGGRIRCMQVWPAEGNKKFETLSYLPPLSTDEVLKQIDYLIRKNWIPCLEFSKIGFVYRENSTSPCYYDGRYWTMWKLPMFGCTEATQVYAEFEECKKAYPDCYIRIIGFDNIKQVQCVMFIAYKPPGSE

SEQ ID NO: 1081 - protein, 168 aa, Setaria italica
MAPTVMASSATSVAPFQGLKSTAGLPVSRRISSTGFVSNGGRIRCMQVWPAEGNKKFETLSYLPPLSTDQLLKQVEYLIRNNWIPCLEFSKVGFVFRENSRSPCYYDGRYWTMWKLPMFGCTEATQVYAELEECKKAYPDCYIRVIGFDNLRQVQCVLFIAYKPPGSE

SEQ ID NO: 1082 - protein, 169 aa, Setaria italica
MAPTVMASSATSVAPFQGLKSTAGLPVSRRISRSTGFVSNGGRIRCMQVWPAEGNKKFETLSYLPPLSTDEVLKQIDYLIRKNWIPCLEFSKIGFVYRENSTSPCYYDGRYWTMWKLPMFGCTEATQVYAEFEECKKAYPDCYIRIIGFDNMKQVQCVMFIAYKPPGSE

SEQ ID NO: 1083 - protein, 511 aa, Setaria italica
MAAMASRAAAATASLDLAAAPALSRRCHRPTSARPSAAAAAARGLRMRGAARVVVAAAAAAAAPAKAGAEEVVLQPIREISGTVKLPGSKSLSNRILLLSALAEGTTVVDNLLDSEDVHYMLGALKALGLSVEADKAAKRAVVAGCGGKFPVEKDAKEEVQLFLGNAGTAMRPLTAAVTAAGGNATYVLDGVPRMRERPIGDLVVGLKQLGADVDCFLGTDCPPVRVKGIGGLPGGKVKLSGSISSQYLSALLMAAPLALGDVEIEIIDKLISIPYVDMTLRLMERFGVKAEHSDNWDRFYIKGGQKYKSPKNAYVEGDASSASYFLAGAAITGGTVTVEGCGTTSLQGDVKFAEVLEKMGAKVTWTETSVTVTGPPREPFGRKHLKAIDVNMNKMPDVAMTLAVVALFADGPTAIRDVASWRVKETERMVAIRTELTKLGASVEEGPDYCIITPPEKLNVTAIDTYDDHRMAMAFSLAACAEVPVTIRDPGCTRKTFPDYFDVLSTFVKN

SEQ ID NO: 1084 - protein, 385 aa, Setaria italica
MEAVLRHPSLSRLKPPNPNPHRTPPPSLASPSLLRLRERRLTVAAVFQDQKPREPASKGGDDEEAYGEVDRIVSSRTIKNPVFAEDGSATTSVATEYLVEWKDGHEPSWIPAEAIDADVVAEYETPWWTAAKKADAEALAALLADETLRRDPDAEDAQGRTAAHFAAGLGSEECLRALAAAGADLGHRERAGGGLTPLHIAVGYGRAGAVRALLELGADPEAPDGQGRTPLELVQEVLARTPKGNPAAFQLRQGLEAAQKELEKAVYEWAEVEKVIDGRGEGKWREYLVEWRDGGEREWVRAPWVAEDLVSDFEAGLEYAVAEAVVDKRPAAAEGGEEKWEYLVKWVDIEEATWEPAENVDDELVQEFELRQSGSAGGDGSATAP

SEQ ID NO: 1085 - protein, 600 aa, Setaria italica
MAAAATAAAASASFPAAAALCRDGRRPSRVSAAATTPAEAAALAAVPAPMVRVVPESLQRESGCLVAGFRERGAGAADGDGFGDAAPGGGGGPGAMEYLTSVLSSKVYDVAIESPLQLATKLSDRLGVNLWIKREDLQPVFSFKLRGAYNMMAKLSPEQLERGVICSSAGNHAQGVALSAQRLGCDAVIVMPVTTPEIKWKSVERLGATVVLEGDSYDEAQSYAKLRCEQEGRTFIPPFDHPDVITGQGTVGMEIVRQLQGPLHAIFVPVGGGGLIAGIAAYVKRVRPEVKIIGVEPSDANAMALSLCHGKRVMLEHVGGFADGVAVKTVGEETFRLCRELVDGIVMVSRDAICASIKDMFEEKRSILEPAGALALAGAEAYCKYYNLKGETVVAITSGANMNFDRLRLVTELADVGRKREAVLATFLPEEQGSFKRFTELVGRMNITEFKYRYDSNAKDALVLYSVGIYTDNELGAMVDRMESAKLRTVNLTDNDLAKDHLRYFIGGRSEIKDELVYRFIFPERPGALMKFLDAFSPCWNISLFHYRAQGEAGANVLVGIQVPPKDFDEFKSRAESLGYEYMSEHNNEIYRLLLRDPKI

SEQ ID NO: 1086 - protein, 684 aa, Setaria italica
MSEADRVRLRAAALALQDDGVRDKPDAKANVFADLGSPVSPLRPRASVATSSSSSSGSAKSPVPSNAGMAGGRRHSGELMAECNPPRMTGHRRCGSGPLIFSGGSSGGSGGGGGDRGSTASSPMLNALPAGNICSSGRVPAAAAAPPPPRSRPDVLGSGTGHYGHGSIMRGAGMAPARSSIDAPSFLGHSSRSPASSPASGGGGSLQEVTRLGNEWYKKGKYAEALRYYERAVSLCPESAACRGNRAAALIGLGRLADALRECEEAVRLDPASGRAHSRLAGVCLRLGMIDKARRNFTQAGHLQQSDPAEWQKLQEVEMHLGRSTDARKIGDWKSALREADAAIASGADSSQLLLALRSEALLRLHKLDEAESTLASLLKLDGTLPSSLTAAKLSGMLAESYVHIVRAQVDMALGRFDTAVAAAEKARDLDPGNAEVGMILNNVRLVAKARAQGNDLFKVGKFSDASIAYGEGLKYDPSNSVLHCNRAACWSKLEKWEKAVDDCNEALRIQPNYTKALLRRAASYAKLERWADCVRDYEVLRKELPSDKEVAEALFHAQIALKATRGEDVSNMKFGGEVEIVTNVEQLHAAIGSPGVSVVYFMSAMNQQCTQITPSVNTLCTECPSVNFLKVNVDSSPLVAKAENVRIVPTFKIYKDGMKVKEMICPTLHVLRYTVRHYSVSSS

SEQ ID NO: 1087 - protein, 605 aa, Setaria italica
MAALATSQLVTTRAGFGLGDASSSMFRPGVQGLRGSRASSPAATLSVRTSARAAPRQQHRRAQRGARFPSLVVCATAGMNVVFVGAEMAPWSKTGGLGDVLGGLPPAMAANGHRVMVISPRYDQYKDAWDTSVVSEIKVGDRYERVRFFHCYKRGVDRVFIDHPSFLERVWGKTGEKIYGPDAGVDYKDNQLRFSLLCQAALEAPRILSLNNNPYFSGPYGEDVVFVCNDWHTGPLSSYLKSNYQSNGIYRNAKTAFCIHNISYQGRFAFSDYPELNLPERFRSSFDFIDGYEKPVEGRKINWMKAGIIEADRVLTVSPYYAEELISGIARGCELDNIMRLTGITGIVNGMDVSEWDPSKDKYIATKYDVSTAIAAKALNKEALQAAAGLPVDRKIPLVAFVGRLEEQKGPDVMAAAIPQLMEEDVQIVLLGTGKKKFERMLMSAEEKYPDKVRAVVKFNAALAHHIMAGADLLAVTSRFEPCGLIQLQGMRYGTPCVCASTGGLVDTVIEGKTGFHMGRLSVDCKVVEPADVQKVASTLKRAIKVVGTPAYEEMVRNCMIQDLSWKGPAKNWENVLLSLGVAGSQPGIEGEEIAPLAKENVAAP

SEQ ID NO: 1088 - DNA, 253 bp, Agrobacterium tumefaciens
  source 1..253: mol_type = other DNA
gatcgttcaaacatttggcaataaagtttcttaagattgaatcctgttgccggtcttgcgatgattatcatataatttctgttgaattacgttaagcatgtaataattaacatgtaatgcatgacgttatttatgagatgggtttttatgattagagtcccgcaattatacatttaatacgcgatagaaaacaaaatatagcgcgcaaactaggataaattatcgcgcgcggtgtcatctatgttactagatc

SEQ ID NO: 1089 - DNA, 300 bp, Oryza sativa
  source 1..300: mol_type = other DNA
attaatcgatcctccgatcccttaattaccataccattacaccatgcatcaatatccatatatatataaaccctttcgcacgtacttatactatgttttgtcatacatatatatgtgtcgaacgatcgatctatcactgatatgatatgattgatccatcagcctgatctctgtatcttgttatttgtataccgtcaaataaaagtttcttccacttgtgttaataattagctactctcatctcatgaaccctatatataactagtttaatttgctgtcaattgaacatgatgatcgatg

SEQ ID NO: 1090 - DNA, 1812 bp, synthetic construct
  source 1..1812: mol_type = other DNA; note = Codon redesigned sequence.
atggtccgtcctgtagaaaccccaacccgtgaaatcaaaaaactcgacggcctgtgggcattcagtctggatcgcgaaaactgtggaattgatcagcgttggtgggaaagcgcgttacaagaaagccgggcaattgctgtgccaggcagttttaacgatcagttcgccgatgcagatattcgtaattatgcgggcaacgtctggtatcagcgcgaagtctttataccgaaaggttgggcaggccagcgtatcgtgctgcgtttcgatgcggtcactcattacggcaaagtgtgggtcaataatcaggaagtgatggagcatcagggcggctatacgccatttgaagccgatgtcacgccgtatgttattgccgggaaaagtgtacgtatcaccgtttgtgtgaacaacgaactgaactggcagactatcccgccgggaatggtgattaccgacgaaaacggcaagaaaaagcagtcttacttccatgatttctttaactatgccggaatccatcgcagcgtaatgctctacaccacgccgaacacctgggtggacgatatcaccgtggtgacgcatgtcgcgcaagactgtaaccacgcgtctgttgactggcaggtggtggccaatggtgatgtcagcgttgaactgcgtgatgcggatcaacaggtggttgcaactggacaaggcactagcgggactttgcaagtggtgaatccgcacctctggcaaccgggtgaaggttatctctatgaactgtgcgtcacagccaaaagccagacagagtgtgatatctacccgcttcgcgtcggcatccggtcagtggcagtgaagggcgaacagttcctgattaaccacaaaccgttctactttactggctttggtcgtcatgaagatgcggacttgcgtggcaaaggattcgataacgtgctgatggtgcacgaccacgcattaatggactggattggggccaactcctaccgtacctcgcattacccttacgctgaagagatgctcgactgggcagatgaacatggcatcgtggtgattgatgaaactgctgctgtcggctttaacctctctttaggcattggtttcgaagcgggcaacaagccgaaagaactgtacagcgaagaggcagtcaacggggaaactcagcaagcgcacttacaggcgattaaagagctgatagcgcgtgacaaaaaccacccaagcgtggtgatgtggagtattgccaacgaaccggatacccgtccgcaaggtgcacgggaatatttcgcgccactggcggaagcaacgcgtaaactcgacccgacgcgtccgatcacctgcgtcaatgtaatgttctgcgacgctcacaccgataccatcagcgatctctttgatgtgctgtgcctgaaccgttattacggatggtatgtccaaagcggcgatttggaaacggcagagaaggtactggaaaaagaacttctggcctggcaggagaaactgcatcagccgattatcatcaccgaatacggcgtggatacgttagccgggctgcactcaatgtacaccgacatgtggagtgaagagtatcagtgtgcatggctggatatgtatcaccgcgtctttgatcgcgtcagcgccgtcgtcggtgaacaggtatggaatttcgccgattttgcgacctcgcaaggcatattgcgcgttggcggtaacaagaaagggatcttcactcgcgaccgcaaaccgaagtcggcggcttttctgctgcaaaaacgctggactggcatgaacttcggtgaaaaaccgcagcagggaggcaaacaatga

SEQ ID NO: 1091 - DNA, 2001 bp, synthetic construct
  source 1..2001: mol_type = other DNA; note = Codon redesigned sequence.
atggtccgtcctgtagaaaccccaacccgtgaaatcaaaaaactcgacggcctgtgggcattcagtctggatcgcgaaaactgtggaattgatcagcgttggtgggaaagcgcgttacaagaaagccgggcaattgctgtgccaggcagttttaacgatcagttcgccgatgcagatattcgtaattatgcgggcaacgtctggtatcagcgcgaagtctttataccgaaaggttgggcaggccagcgtatcgtgctgcgtttcgatgcggtcactcattacggcaaagtgtgggtcaataatcaggaagtgatggagcatcagggcggctatacgccatttgaagccgatgtcacgccgtatgttattgccgggaaaagtgtacgtaagtttctgcttctacctttgatatatatataataattatcattaattagtagtaatataatatttcaaatatttttttcaaaataaaagaatgtagtatatagcaattgcttttctgtagtttataagtgtgtatattttaatttataacttttctaatatatgaccaaaatttgttgatgtgcaggtatcaccgtttgtgtgaacaacgaactgaactggcagactatcccgccgggaatggtgattaccgacgaaaacggcaagaaaaagcagtcttacttccatgatttctttaactatgccggaatccatcgcagcgtaatgctctacaccacgccgaacacctgggtggacgatatcaccgtggtgacgcatgtcgcgcaagactgtaaccacgcgtctgttgactggcaggtggtggccaatggtgatgtcagcgttgaactgcgtgatgcggatcaacaggtggttgcaactggacaaggcactagcgggactttgcaagtggtgaatccgcacctctggcaaccgggtgaaggttatctctatgaactgtgcgtcacagccaaaagccagacagagtgtgatatctacccgcttcgcgtcggcatccggtcagtggcagtgaagggcgaacagttcctgattaaccacaaaccgttctactttactggctttggtcgtcatgaagatgcggacttgcgtggcaaaggattcgataacgtgctgatggtgcacgaccacgcattaatggactggattggggccaactcctaccgtacctcgcattacccttacgctgaagagatgctcgactgggcagatgaacatggcatcgtggtgattgatgaaactgctgctgtcggctttaacctctctttaggcattggtttcgaagcgggcaacaagccgaaagaactgtacagcgaagaggcagtcaacggggaaactcagcaagcgcacttacaggcgattaaagagctgatagcgcgtgacaaaaaccacccaagcgtggtgatgtggagtattgccaacgaaccggatacccgtccgcaaggtgcacgggaatatttcgcgccactggcggaagcaacgcgtaaactcgacccgacgcgtccgatcacctgcgtcaatgtaatgttctgcgacgctcacaccgataccatcagcgatctctttgatgtgctgtgcctgaaccgttattacggatggtatgtccaaagcggcgatttggaaacggcagagaaggtactggaaaaagaacttctggcctggcaggagaaactgcatcagccgattatcatcaccgaatacggcgtggatacgttagccgggctgcactcaatgtacaccgacatgtggagtgaagagtatcagtgtgcatggctggatatgtatcaccgcgtctttgatcgcgtcagcgccgtcgtcggtgaacaggtatggaatttcgccgattttgcgacctcgcaaggcatattgcgcgttggcggtaacaagaaagggatcttcactcgcgaccgcaaaccgaagtcggcggcttttctgctgcaaaaacgctggactggcatgaacttcggtgaaaaaccgcagcagggaggcaaacaatga

SEQ ID NO: 1092 - DNA, 1812 bp, synthetic construct
  source 1..1812: mol_type = other DNA; note = Codon redesigned sequence.
atggtccgtcctgtagaaaccccaacccgtgaaatcaaaaaactcgacggcctgtgggcattcagtctggatcgcgaaaactgtggaattgatcagcgttggtgggaaagcgcgttacaagaaagccgggcaattgctgtgccaggcagttttaacgatcagttcgccgatgcagatattcgtaattatgcgggcaacgtctggtatcagcgcgaagtctttataccgaaaggttgggcaggccagcgtatcgtgctgcgtttcgatgcggtcactcattacggcaaagtgtgggtcaataatcaggaagtgatggagcatcagggcggctatacgccatttgaagccgatgtcacgccgtatgttattgccgggaaaagtgtacgtatcaccgtttgtgtgaacaacgaactgaactggcagactatcccgccgggaatggtgattaccgacgaaaacggcaagaaaaagcagtcttacttccatgatttctttaactatgccggaatccatcgcagcgtaatgctctacaccacgccgaacacctgggtggacgatatcaccgtggtgacgcatgtcgcgcaagactgtaaccacgcgtctgttgactggcaggtggtggccaatggtgatgtcagcgttgaactgcgtgatgcggatcaacaggtggttgcaactggacaaggcactagcgggactttgcaagtggtgaatccgcacctctggcaaccgggtgaaggttatctctatgaactgtgcgtcacagccaaaagccagacagagtgtgatatctacccgcttcgcgtcggcatccggtcagtggcagtgaagggcgaacagttcctgattaaccacaaaccgttctactttactggctttggtcgtcatgaagatgcggacttacgtggcaaaggattcgataacgtgctgatggtgcacgaccacgcattaatggactggattggggccaactcctaccgtacctcgcattacccttacgctgaagagatgctcgactgggcagatgaacatggcatcgtggtgattgatgaaactgctgctgtcggctttaacctctctttaggcattggtttcgaagcgggcaacaagccgaaagaactgtacagcgaagaggcagtcaacggggaaactcagcaagcgcacttacaggcgattaaagagctgatagcgcgtgacaaaaaccacccaagcgtggtgatgtggagtattgccaacgaaccggatacccgtccgcaagctgcacgggaatatttcggcccactggcggaagcaacgcgtaaactcgacccgacgcgtccgatcacctgcgtcaatgtaatgttctgcgacgctcacaccgataccatcagcgatctctttgatgtgctgtgcctgaaccgttattacggatggtatgtccaaagcggcgatttggaaacggcagagaaggtactggaaaaagaacttctggcctggcaggagaaactgcatcagccgattatcatcaccgaatacggcgtggatacgttagccgggctgcactcaatgtacaccgacatgtggagtgaagagtatcagtgtgcatggctggatatgtatcaccgcgtctttgatcgcgtcagcgccgtcgtcggtgaacaggtatggaatttcgccgattttgcgacctcgcaaggcatattgcgcgttggcggtaacaagaaagggatcttcactcgcgaccgcaaaccgaagtcggcggcttttctgctgcaaaaacgctggactggcatgaacttcggtgaaaaaccgcagcagggaggcaaacaatga

SEQ ID NO: 1093 - DNA, 1528 bp, Oryza sativa
  source 1..1528: mol_type = other DNA
ggaagctaactagtcacggcgaatacatgacgacatcggcctacaacgcacaacttcttggcataaaagcttcaatttcaatgcccctatctggaagccctaggcgccgcgcaaatgtaaaacattcgcttcgcttggcttgttatccaaaatagagtatggacctccgacagattggcaacccgtgggtaatcgaaaatggctccatctgcccctttgtcgaaggaatcaggaaacggccctcacctcctggcggagtgtagatatgtgaaagaatctaggcgacacttgcagactggacaacatgtgaacaaataagaccaacgttatggcaacaagcctcgacgctactcaagtggtgggaggccaccgcatgttccaacgaagcgccaaagaaagccttgcagactctaatgctattagtcgcctaggatatttggaatgaaaggaaccgcagagtttttcagcaccaagagcttccggtggctagtctgatagccaaaattaaggaggatgccaaaacatgggtcttggcgggcgcgaaacaccttgataggtggcttaccttttaacatgttcgggccaaaggccttgagacggtaaagttttctatttgcgcttgcgcatgtacaattttattcctctattcaatgaaattggtggctcactggttcattaaaaaaaaaagaatctagcctgttcgggaagaagaggattttattcgtgagagagagagagagagagagagagagagggagagagaaggaggaggaggattttcaggcttcgcattgcccaacctctgcttctgttggcccaagaagaatcccaggcgcccatgggctggcagtttaccacggacctacctagcctaccttagctatctaagcgggccgacctagtagctacgtgcctagtgtagattaaagttggcgggccagcaggaagccacgctgcaatggcatcttcccctgtccttcgcgtacgtgaaaacaaacccaggtaagcttagaatcttcttgcccgttggactgggacacccaccaatcccaccatgccccgatattcctccggtctcggttcatgtgatgtcctctcttgtgtgatcacggagcaagcattcttaaacggcaaaagaaaatcaccaacttgctcacgcagtcacgctgcaccgcgcgaagcgacgcccgataggccaagatcgcgagataaaataacaaccaatgatcataaggaaacaagcccgcgatgtgtcgtgtgcagcaatcttggtcatttgcgggatcgagtgcttcacggctaaccaaatattcggccgatgatttaacacattatcagcgtagatgtacgtacgatttgttaattaatctacgagccttgctagggcaggtgttctgccagccaatccagatcgccctcgtatgcacgctcacatgatggcagggcagggttcacatgagctctaacggtcgattaattaatcccggggctcgactataaatacctccctaatcccatgatcaaaacc

SEQ ID NO: 1094 - DNA, 99 bp, Oryza sativa
  source 1..99: mol_type = other DNA
atctcaagcagcctaatcatctccagctgatcaagagctcttaattagctagctagtgattagctgcgcttgtgatcgatcgatctcgggtacgtagca

SEQ ID NO: 1095 - DNA, 614 bp, Cauliflower mosaic virus
  source 1..614: mol_type = other DNA
ggtccgatgtgagacttttcaacaaagggtaatatccggaaacctcctcggattccattgcccagctatctgtcactttattgtgaagatagtggaaaaggaaggtggctcctacaaatgccatcattgcgataaaggaaaggccatcgttgaagatgcctctgccgacagtggtcccaaagatggacccccacccacgaggagcatcgtggaaaaagaagacgttccaaccacgtcttcaaagcaagtggattgatgtgatggtccgatgtgagacttttcaacaaagggtaatatccggaaacctcctcggattccattgcccagctatctgtcactttattgtgaagatagtggaaaaggaaggtggctcctacaaatgccatcattgcgataaaggaaaggccatcgttgaagatgcctctgccgacagtggtcccaaagatggacccccacccacgaggagcatcgtggaaaaagaagacgttccaaccacgtcttcaaagcaagtggattgatgtgatatctccactgacgtaagggatgacgcacaatcccactatccttcgcaagacccttcctctatataaggaagttcatttcatttggagagg

SEQ ID NO: 1096 - DNA, 623 bp, Cauliflower mosaic virus
  source 1..623: mol_type = other DNA
ggtccgatgtgagacttttcaacaaagggtaatatccggaaacctcctcggattccattgcccagctatctgtcactttattgtgaagatagtggaaaaggaaggtggctcctacaaatgccatcattgcgataaaggaaaggccatcgttgaagatgcctctgccgacagtggtcccaaagatggacccccacccacgaggagcatcgtggaaaaagaagacgttccaaccacgtcttcaaagcaagtggattgatgtgatggtccgatgtgagacttttcaacaaagggtaatatccggaaacctcctcggattccattgcccagctatctgtcactttattgtgaagatagtggaaaaggaaggtggctcctacaaatgccatcattgcgataaaggaaaggccatcgttgaagatgcctctgccgacagtggtcccaaagatggacccccacccacgaggagcatcgtggaaaaagaagacgttccaaccacgtcttcaaagcaagtggattgatgtgatatctccactgacgtaagggatgacgcacaatcccactatccttcgcaagacccttcctctatataaggaagttcatttcatttggagaggacacgctga

SEQ ID NO: 1097 - skipped

SEQ ID NO: 1098 - DNA, 1399 bp, Oryza sativa
  source 1..1399: mol_type = other DNA
tcgaggtcattcatatgcttgagaagagagtcgggatagtccaaaataaaacaaaggtaagattacctggtcaaaagtgaaaacatcagttaaaaggtggtataaagtaaaatatcggtaataaaaggtggcccaaagtgaaatttactcttttctactattataaaaattgaggatgtttttgtcggtactttgatacgtcatttttgtatgaattggtttttaagtttattcgcttttggaaatgcatatctgtatttgagtcgggttttaagttcgtttgcttttgtaaatacagagggatttgtataagaaatatctttagaaaaacccatatgctaatttgacataatttttgagaaaaatatatattcaggcgaattctcacaatgaacaataataagattaaaatagctttcccccgttgcagcgcatgggtattttttctagtaaaaataaaagataaacttagactcaaaacatttacaaaaacaacccctaaagttcctaaagcccaaagtgctatccacgatccatagcaagcccagcccaacccaacccaacccaacccaccccagtccagccaactggacaatagtctccacacccccccactatcaccgtgagttgtccgcacgcaccgcacgtctcgcagccaaaaaaaaaaagaaagaaaaaaaagaaaaagaaaaaacagcaggtgggtccgggtcgtgggggccggaaacgcgaggaggatcgcgagccagcgacgaggccggccctccctccgcttccaaagaaacgccccccatcgccactatatacatacccccccctctcctcccatccccccaaccctaccaccaccaccaccaccacctccacctcctcccccctcgctgccggacgacgagctcctcccccctccccctccgccgccgccgcgccggtaaccaccccgcccctctcctctttctttctccgtttttttttccgtctcggtctcgatctttggccttggtagtttgggtgggcgagaggcggcttcgtgcgcgcccagatcggtgcgcgggaggggcgggatctcgcggctggggctctcgccggcgtggatccggcccggatctcgcggggaatggggctctcggatgtagatctgcgatccgccgttgttgggggagatgatggggggtttaaaatttccgccgtgctaaacaagatcaggaagaggggaaaagggcactatggtttatatttttatatatttctgctgcttcgtcaggcttagatgtgctagatctttctttcttctttttgtgggtagaatttgaatccctcagcattgttcatcggtagtttttcttttcatgatttgtgacaaatgcagcctcgtgcggagcttttttgtaggtagaag

SEQ ID NO: 1099 - DNA, 841 bp, Oryza sativa
  source 1..841: mol_type = other DNA
tcgaggtcattcatatgcttgagaagagagtcgggatagtccaaaataaaacaaaggtaagattacctggtcaaaagtgaaaacatcagttaaaaggtggtataaagtaaaatatcggtaataaaaggtggcccaaagtgaaatttactcttttctactattataaaaattgaggatgtttttgtcggtactttgatacgtcatttttgtatgaattggtttttaagtttattcgcttttggaaatgcatatctgtatttgagtcgggttttaagttcgtttgcttttgtaaatacagagggatttgtataagaaatatctttagaaaaacccatatgctaatttgacataatttttgagaaaaatatatattcaggcgaattctcacaatgaacaataataagattaaaatagctttcccccgttgcagcgcatgggtattttttctagtaaaaataaaagataaacttagactcaaaacatttacaaaaacaacccctaaagttcctaaagcccaaagtgctatccacgatccatagcaagcccagcccaacccaacccaacccaacccaccccagtccagccaactggacaatagtctccacacccccccactatcaccgtgagttgtccgcacgcaccgcacgtctcgcagccaaaaaaaaaaagaaagaaaaaaaagaaaaagaaaaaacagcaggtgggtccgggtcgtgggggccggaaacgcgaggaggatcgcgagccagcgacgaggccggccctccctccgcttccaaagaaacgccccccatcgccactatatacatacccccccctctcctcccatccccccaaccct

SEQ ID NO: 1100 - DNA, 80 bp, Oryza sativa
  source 1..80: mol_type = other DNA
accaccaccaccaccaccacctccacctcctcccccctcgctgccggacgacgagctcctcccccctccccctccgccgc

SEQ ID NO: 1101 - DNA, 478 bp, Oryza sativa
  source 1..478: mol_type = other DNA
cgccgcgccggtaaccaccccgcccctctcctctttctttctccgtttttttttccgtctcggtctcgatctttggccttggtagtttgggtgggcgagaggcggcttcgtgcgcgcccagatcggtgcgcgggaggggcgggatctcgcggctggggctctcgccggcgtggatccggcccggatctcgcggggaatggggctctcggatgtagatctgcgatccgccgttgttgggggagatgatggggggtttaaaatttccgccgtgctaaacaagatcaggaagaggggaaaagggcactatggtttatatttttatatatttctgctgcttcgtcaggcttagatgtgctagatctttctttcttctttttgtgggtagaatttgaatccctcagcattgttcatcggtagtttttcttttcatgatttgtgacaaatgcagcctcgtgcggagcttttttgtaggtagaag

SEQ ID NO: 1102 - DNA, 804 bp, Zea mays
  source 1..804: mol_type = other DNA
accgtcttcggtacgcgctcactccgccctctgcctttgttactgccacgtttctctgaatgctctcttgtgtggtgattgctgagagtggtttagctggatctagaattacactctgaaatcgtgttctgcctgtgctgattacttgccgtcctttgtagcagcaaaatatagggacatggtagtacgaaacgaagatagaacctacacagcaatacgagaaatgtgtaatttggtgcttagcggtatttatttaagcacatgttggtgttatagggcacttggattcagaagtttgctgttaatttaggcacaggcttcatactacatgggtcaatagtatagggattcatattataggcgatactataataatttgttcgtctgcagagcttattatttgccaaaattagatattcctattctgtttttgtttgtgtgctgttaaattgttaacgcctgaaggaataaatataaatgacgaaattttgatgtttatctctgctcctttattgtgaccataagtcaagatcagatgcacttgttttaaatattgttgtctgaagaaataagtactgacagtattttgatgcattgatctgcttgtttgttgtaacaaaatttaaaaataaagagtttcctttttgttgctctccttacctcctgatggtatctagtatctaccaactgacactatattgcttctctttacatacgtatcttgctcgatgccttctccctagtgttgaccagtgttactcacatagtctttgctcatttcattgtaatgcagataccaagcgg

SEQ ID NO: 1103 - DNA, 906 bp, synthetic construct
  source 1..906: mol_type = other DNA; note = Codon redesigned sequence.
atgggcaagggcgaggaactgttcactggcgtggtcccaatcctggtggaactggatggtgatgtgaacgggcacaagttctccgtcagcggagagggtgaaggtgatgccacctacggaaagctcaccctgaagttcatctgcactaccggaaagctccctgttccgtggccaaccctcgtcaccactttcacctacggtgttcagtgcttctcccggtacccagatcacatgaagcagcatgacttcttcaagagcgccatgcccgaaggctacgtgcaagaaaggactatctctttcaaggatgacgggaactacaagacacgtgccgaagtcaagttcgaaggtgataccctggtgaaccgcatcgagctgaaaggtaagtttctgcttctacctttgatatatatataataattatcattaattagtagtaatataatatttcaaatatttttttcaaaataaaagaatgtagtatatagcaattgcttttctgtagtttataagtgtgtatattttaatttataacttttctaatatatgaccaaaatttgttgatgtgcaggtatcgatttcaaggaagatggaaacatcctcggacacaagctggagtacaactacaactcccacaacgtatacatcacggccgacaagcagaagaacggcatcaaggctaacttcaagatcaggcacaacatcgaagatggaagcgtgcaactggcggaccactaccagcagaacacgcccatcggcgatggccctgtcctgctgccggacaaccattacctgtccacgcaatctgccctctccaaggaccccaacgagaagagggaccacatggtcctgctggagttcgtgacggctgctgggatcacgcatggcatggatgaactctacaagtga

SEQ ID NO: 1104 - DNA, 1448 bp, synthetic construct
  source 1..1448: mol_type = other DNA; note = Chimeric transcriptional regulatory element group.
ggtccgatgtgagacttttcaacaaagggtaatatccggaaacctcctcggattccattgcccagctatctgtcactttattgtgaagatagtggaaaaggaaggtggctcctacaaatgccatcattgcgataaaggaaaggccatcgttgaagatgcctctgccgacagtggtcccaaagatggacccccacccacgaggagcatcgtggaaaaagaagacgttccaaccacgtcttcaaagcaagtggattgatgtgatggtccgatgtgagacttttcaacaaagggtaatatccggaaacctcctcggattccattgcccagctatctgtcactttattgtgaagatagtggaaaaggaaggtggctcctacaaatgccatcattgcgataaaggaaaggccatcgttgaagatgcctctgccgacagtggtcccaaagatggacccccacccacgaggagcatcgtggaaaaagaagacgttccaaccacgtcttcaaagcaagtggattgatgtgatatctccactgacgtaagggatgacgcacaatcccactatccttcgcaagacccttcctctatataaggaagttcatttcatttggagaggacacgctgacaagctgactctagcagatctaccgtcttcggtacgcgctcactccgccctctgcctttgttactgccacgtttctctgaatgctctcttgtgtggtgattgctgagagtggtttagctggatctagaattacactctgaaatcgtgttctgcctgtgctgattacttgccgtcctttgtagcagcaaaatatagggacatggtagtacgaaacgaagatagaacctacacagcaatacgagaaatgtgtaatttggtgcttagcggtatttatttaagcacatgttggtgttatagggcacttggattcagaagtttgctgttaatttaggcacaggcttcatactacatgggtcaatagtatagggattcatattataggcgatactataataatttgttcgtctgcagagcttattatttgccaaaattagatattcctattctgtttttgtttgtgtgctgttaaattgttaacgcctgaaggaataaatataaatgacgaaattttgatgtttatctctgctcctttattgtgaccataagtcaagatcagatgcacttgttttaaatattgttgtctgaagaaataagtactgacagtattttgatgcattgatctgcttgtttgttgtaacaaaatttaaaaataaagagtttcctttttgttgctctccttacctcctgatggtatctagtatctaccaactgacactatattgcttctctttacatacgtatcttgctcgatgccttctccctagtgttgaccagtgttactcacatagtctttgctcatttcattgtaatgcagataccaagcgg

SEQ ID NO: 1105 - DNA, 1204 bp, synthetic construct
  source 1..1204: mol_type = other DNA; note = Chimeric transcriptional regulatory element.
ggtccgattgagacttttcaacaaagggtaatatccggaaacctcctcggattccattgcccagctatctgtcactttattgtgaagatagtggaaaaggaaggtggctcctacaaatgccatcattgcgataaaggaaaggccatcgttgaagatgcctctgccgacagtggtcccaaagatggacccccacccacgaggagcatcgtggaaaaagaagacgttccaaccacgtcttcaaagcaagtggattgatgtgatggtccgattgagacttttcaacaaagggtaatatccggaaacctcctcggattccattgcccagctatctgtcactttattgtgaagatagtggaaaaggaaggtggctcctacaaatgccatcattgcgataaaggaaaggccatcgttgaagatgcctctgccgacagtggtcccaaagatggacccccacccacgaggagcatcgtggaaaaagaagacgttccaaccacgtcttcaaagcaagtggattgatgtgatatctccactgacgtaagggatgacgcacaatcccactatccttcgcaagacccttcctctatataaggaagttcatttcatttggagaggacacgctgacaagctgactctagcagatcctctagaaccatcttccacacactcaagccacactattggagaacacacagggacaacacaccataagatccaagggaggcctccgccgccgccggtaaccaccccgcccctctcctctttctttctccgtttttttttccgtctcggtctcgatctttggccttggtagtttgggtgggcgagaggcggcttcgtgcgcgcccagatcggtgcgcgggaggggcgggatctcgcggctggggctctcgccggcgtggatccggcccggatctcgcggggaatggggctctcggatgtagatctgcgatccgccgttgttgggggagatgatggggggtttaaaatttccgccgtgctaaacaagatcaggaagaggggaaaagggcactatggtttatatttttatatatttctgctgcttcgtcaggcttagatgtgctagatctttctttcttctttttgtgggtagaatttgaatccctcagcattgttcatcggtagtttttcttttcatgatttgtgacaaatgcagcctcgtgcggagcttttttgtaggtagaag

SEQ ID NO: 1106 - DNA, 675 bp, synthetic construct
  source 1..675: mol_type = other DNA; note = Chimeric transcriptional regulatory element.
ggtccgatgtgagacttttcaacaaagggtaatatccggaaacctcctcggattccattgcccagctatctgtcactttattgtgaagatagtggaaaaggaaggtggctcctacaaatgccatcattgcgataaaggaaaggccatcgttgaagatgcctctgccgacagtggtcccaaagatggacccccacccacgaggagcatcgtggaaaaagaagacgttccaaccacgtcttcaaagcaagtggattgatgtgatggtccgatgtgagacttttcaacaaagggtaatatccggaaacctcctcggattccattgcccagctatctgtcactttattgtgaagatagtggaaaaggaaggtggctcctacaaatgccatcattgcgataaaggaaaggccatcgttgaagatgcctctgccgacagtggtcccaaagatggacccccacccacgaggagcatcgtggaaaaagaagacgttccaaccacgtcttcaaagcaagtggattgatgtgatatctccactgacgtaagggatgacgcacaatcccactatccttcgcaagacccttcctctatataaggaagttcatttcatttggagaggaaccatcttccacacactcaagccacactattggagaacacacagggacaacacaccataa

SEQ ID NO: 1107 - DNA, 2181 bp, Oryza sativa
  source 1..2181: mol_type = other DNA
gacaacaacatgcttctcatcaacatggagggaagagggagggagaaagtgtcgcctggtcacctccattgtcacactagccactggccagctctcccacaccaccaatgccaggggcgagctttagcacagccaccgcttcacctccaccaccgcactaccctagcttcgcccaacagccaccgtcaacgcctcctctccgtcaacataagagagagagagaagaggagagtagccatgtggggaggaggaatagtacatggggcctaccgtttggcaagttattttgggttgccaagttaggccaataaggggagggatttggccatccggttggaaaggttattggggtagtatctttttactagaattgtcaaaaaaaaatagtttgagagccatttggagaggatgttgcctgttagaggtgctcttaggacatcaaattccataaaaacatcagaaaaattctctcgatgaagatttataaccactaaaactgccctcaattcgaagggagttcaaaacaattaaaatcatgttcgaattgagtttcaatttcactttaacccctttgaaatctcaatggtaaaacatcaacccgtcaggtagcatggttctttttattcctttcaaaaagagttaattacaaacagaatcaaaactaacagttaggcccaaggcccatccgagcaaacaatagatcatgggccaggcctgccaccaccctccccctcctggctcccgctcttgaatttcaaaatccaaaaatatcggcacgactggccgccgacggagcgggcggaaaatgacggaacaacccctcgaattctaccccaactacgcccaccaacccacacgccactgacaatccggtcccacccttgtgggcccacctacaagcgagacgtcagtcgctcgcagcaaccagtgggcccacctcccagtgagcggcgggtagatctggactcttacccacccacactaaacaaaacggcatgaatattttgcactaaaaccctcagaaaaattccgatattccaaaccagtacagttcctgaccgttggaggagccaaagtggagcggagtgtaaaattgggaaacttaatcgagggggttaaacgcaaaaacgccgaggcgcctcccgctctatagaaaggggaggagtgggaggtggaaaccctaccacaccgcagagaaaggcgtcttcgtactcgcctctctccgcgccctcctccgccgccgctcgccgccgttcgtctccgccgccaccggctagccatccaggtaaaacaaacaaaaacggatctgatgcttccattcctccgtttctcgtagtagcgcgcttcgatctgtgggtggatctgggtgatcctggggtgtggttcgttctgtttgatagatctgtcggtggatctggccttctgtggttgtcgatgtccggatctgcgttttgatcagtggtagttcgtggatctggcgaaatgttttggatctggcagtgagacgctaagaatcgggaaatgatgcaatattaggggggtttcggatggggatccactgaattagtctgtctccctgctgataatctgttcctttttggtagatctggttagtgtatgtttgtttcggatagatctgatcaatgcttgtttgttttttcaaattttctacctaggttgtataggaatggcatgcggatctggttggattgccatgatccgtgctgaaatgcccctttggttgatggatcttgatattttactgctgttcacctagatttgtactcccgtttatacttaatttgttgcttattatgaatagatctgtaacttaggcacatgtatggacggagtatgtggatctgtagtatgtacattgctgcgagctaagaactatttcagagcaagcacagaaaaaaatatttagacagattgggcaactatttgatggtctttggtatcatgctttgtagtgctcgtttctgcgtagtaatcttttgatctgatctgaagataggtgctattatattcttaaaggtcattagaacgctatctgaaaggctgtattatgtggattggttcacctgtgactccctgttcgtcttgtcttgataaatcctgtgataaaaaaaattcttaaggcgtaatttgttgaaatcttgttttgtcctatgcagcctg

SEQ ID NO: 1108 - DNA, 210 bp, Triticum aestivum
  source 1..210: mol_type = other DNA
ctgcatgcgtttggacgtatgctcattcaggttggagccaatttggttgatgtgtgtgcgagttcttgcgagtctgatgagacatctctgtattgtgtttctttccccagtgttttctgtacttgtgtaatcggctaatcgccaacagattcggcgatgaataaatgagaaataaattgttctgattttgagtgcaaaaaaaaaggaatt

SEQ ID NO: 1109 - DNA, 1653 bp, synthetic construct
  source 1..1653: mol_type = other DNA; note = Codon redesigned DNA sequence.
atggaagacgccaaaaacataaagaaaggcccggcgccattctatcctctagaggatggaaccgctggagagcaactgcataaggctatgaagagatacgccctggttcctggaacaattgcttttacagatgcacatatcgaggtgaacatcacgtacgcggaatacttcgaaatgtccgttcggttggcagaagctatgaaacgatatgggctgaatacaaatcacagaatcgtcgtatgcagtgaaaactctcttcaattctttatgccggtgttgggcgcgttatttatcggagttgcagttgcgcccgcgaacgacatttataatgaacgtgaattgctcaacagtatgaacatttcgcagcctaccgtagtgtttgtttccaaaaaggggttgcaaaaaattttgaacgtgcaaaaaaaattaccaataatccagaaaattattatcatggattctaaaacggattaccagggatttcagtcgatgtacacgttcgtcacatctcatctacctcccggttttaatgaatacgattttgtaccagagtcctttgatcgtgacaaaacaattgcactgataatgaattcctctggatctactgggttacctaagggtgtggcccttccgcatagaactgcctgcgtcagattctcgcatgccagagatcctatttttggcaatcaaatcattccggatactgcgattttaagtgttgttccattccatcacggttttggaatgtttactacactcggatatttgatatgtggatttcgagtcgtcttaatgtatagatttgaagaagagctgtttttacgatcccttcaggattacaaaattcaaagtgcgttgctagtaccaaccctattttcattcttcgccaaaagcactctgattgacaaatacgatttatctaatttacacgaaattgcttctgggggcgcacctctttcgaaagaagtcggggaagcggttgcaaaacgcttccatcttccagggatacgacaaggatatgggctcactgagactacatcagctattctgattacacccgagggggatgataaaccgggcgcggtcggtaaagttgttccattttttgaagcgaaggttgtggatctggataccgggaaaacgctgggcgttaatcagagaggcgaattatgtgtcagaggacctatgattatgtccggttatgtaaacaatccggaagcgaccaacgccttgattgacaaggatggatggctacattctggagacatagcttactgggacgaagacgaacacttcttcatagttgaccgcttgaagtctttaattaaatacaaaggatatcaggtggcccccgctgaattggaatcgatattgttacaacaccccaacatcttcgacgcgggcgtggcaggtcttcccgacgatgacgccggtgaacttcccgccgccgttgttgttttggagcacggaaagacgatgacggaaaaagagatcgtggattacgtcgccagtcaagtaacaaccgcgaaaaagttgcgcggaggagttgtgtttgtggacgaagtaccgaaaggtcttaccggaaaactcgacgcaagaaaaatcagagagatcctcataaaggccaagaagggcggaaagtccaaattgtaa

SEQ ID NO: 1110 - DNA, 936 bp, synthetic construct
  source 1..936: mol_type = other DNA; note = Codon redesigned coding sequence.
atggcttccaaggtgtacgaccccgagcaacgcaaacgcatgatcactgggcctcagtggtgggctcgctgcaagcaaatgaacgtgctggactccttcatcaactactatgattccgagaagcacgccgagaacgccgtgatttttctgcatggtaacgctgcctccagctacctgtggaggcacgtcgtgcctcacatcgagcccgtggctagatgcatcatccctgatctgatcggaatgggtaagtccggcaagagcgggaatggctcatatcgcctcctggatcactacaagtacctcaccgcttggttcgagctgctgaaccttccaaagaaaatcatctttgtgggccacgactggggggcttgtctggcctttcactactcctacgagcaccaagacaagatcaaggccatcgtccatgctgagagtgtcgtggacgtgatcgagtcctgggacgagtggcctgacatcgaggaggatatcgccctgatcaagagcgaagagggcgagaaaatggtgcttgagaataacttcttcgtcgagaccatgctcccaagcaagatcatgcggaaactggagcctgaggagttcgctgcctacctggagccattcaaggagaagggcgaggttagacggcctaccctctcctggcctcgcgagatccctctcgttaagggaggcaagcccgacgtcgtccagattgtccgcaactacaacgcctaccttcgggccagcgacgatctgcctaagatgttcatcgagtccgaccctgggttcttttccaacgctattgtcgagggagctaagaagttccctaacaccgagttcgtgaaggtgaagggcctccacttcagccaggaggacgctccagatgaaatgggtaagtacatcaagagcttcgtggagcgcgtgctgaagaacgagcagtaa

SEQ ID NO: 1111 - skipped

SEQ ID NO: 1112 - DNA, 612 bp, Cauliflower mosaic virus
  source 1..612: mol_type = other DNA
ggtccgattgagacttttcaacaaagggtaatatccggaaacctcctcggattccattgcccagctatctgtcactttattgtgaagatagtggaaaaggaaggtggctcctacaaatgccatcattgcgataaaggaaaggccatcgttgaagatgcctctgccgacagtggtcccaaagatggacccccacccacgaggagcatcgtggaaaaagaagacgttccaaccacgtcttcaaagcaagtggattgatgtgatggtccgattgagacttttcaacaaagggtaatatccggaaacctcctcggattccattgcccagctatctgtcactttattgtgaagatagtggaaaaggaaggtggctcctacaaatgccatcattgcgataaaggaaaggccatcgttgaagatgcctctgccgacagtggtcccaaagatggacccccacccacgaggagcatcgtggaaaaagaagacgttccaaccacgtcttcaaagcaagtggattgatgtgatatctccactgacgtaagggatgacgcacaatcccactatccttcgcaagacccttcctctatataaggaagttcatttcatttggagagg

SEQ ID NO: 1113 - DNA, 480 bp, Oryza sativa
  source 1..480: mol_type = other DNA
ccgccgccgccggtaaccaccccgcccctctcctctttctttctccgtttttttttccgtctcggtctcgatctttggccttggtagtttgggtgggcgagaggcggcttcgtgcgcgcccagatcggtgcgcgggaggggcgggatctcgcggctggggctctcgccggcgtggatccggcccggatctcgcggggaatggggctctcggatgtagatctgcgatccgccgttgttgggggagatgatggggggtttaaaatttccgccgtgctaaacaagatcaggaagaggggaaaagggcactatggtttatatttttatatatttctgctgcttcgtcaggcttagatgtgctagatctttctttcttctttttgtgggtagaatttgaatccctcagcattgttcatcggtagtttttcttttcatgatttgtgacaaatgcagcctcgtgcggagcttttttgtaggtagaag

SEQ ID NO: 1114 - DNA, 61 bp, Triticum aestivum
  source 1..61: mol_type = other DNA
aaccatcttccacacactcaagccacactattggagaacacacagggacaacacaccataa

SEQ ID NO: 1115 - DNA, 993 bp, Figwort mosaic virus
  source 1..993: mol_type = other DNA
aattctcagtccaaagcctcaacaaggtcagggtacagagtctccaaaccattagccaaaagctacaggagatcaatgaagaatcttcaatcaaagtaaactactgttccagcacatgcatcatggtcagtaagtttcagaaaaagacatccaccgaagacttaaagttagtgggcatctttgaaagtaatcttgtcaacatcgagcagctggcttgtggggaccagacaaaaaaggaatggtgcagaattgttaggcgcacctaccaaaagcatctttgcctttattgcaaagataaagcagattcctctagtacaagtggggaacaaaataacgtggaaaagagctgtcctgacagcccactcactaatgcgtatgacgaacgcagtgacgaccacaaaagaattagcttgagctcaggatttagcagcattccagattgggttcaatcaacaaggtacgagccatatcactttattcaaattggtatcgccaaaaccaagaaggaactcccatcctcaaaggtttgtaaggaagaattctcagtccaaagcctcaacaaggtcagggtacagagtctccaaaccattagccaaaagctacaggagatcaatgaagaatcttcaatcaaagtaaactactgttccagcacatgcatcatggtcagtaagtttcagaaaaagacatccaccgaagacttaaagttagtgggcatctttgaaagtaatcttgtcaacatcgagcagctggcttgtggggaccagacaaaaaaggaatggtgcagaattgttaggcgcacctaccaaaagcatctttgcctttattgcaaagataaagcagattcctctagtacaagtggggaacaaaataacgtggaaaagagctgtcctgacagcccactcactaatgcgtatgacgaacgcagtgacgaccacaaaagaattccctctatataagaaggcattcattcccatttgaaggatcatcagatac

SEQ ID NO: 1116 - DNA, 522 bp, Cauliflower mosaic virus
  source 1..522: mol_type = other DNA
ggtccgattgagacttttcaacaaagggtaatatccggaaacctcctcggattccattgcccagctatctgtcactttattgtgaagatagtggaaaaggaaggtggctcctacaaatgccatcattgcgataaaggaaaggccatcgttgaagatgcctctgccgacagtggtcccaaagatggacccccacccacgaggagcatcgtggaaaaagaagacgttccaaccacgtcttcaaagcaagtggattgatgtgatggtccgattgagacttttcaacaaagggtaatatccggaaacctcctcggattccattgcccagctatctgtcactttattgtgaagatagtggaaaaggaaggtggctcctacaaatgccatcattgcgataaaggaaaggccatcgttgaagatgcctctgccgacagtggtcccaaagatggacccccacccacgaggagcatcgtggaaaaagaagacgttccaaccacgtcttcaaagcaagtggattgatgtgat

SEQ ID NO: 1117 - DNA, 608 bp, Cauliflower mosaic virus
  source 1..608: mol_type = other DNA
ggtccgatgtgagacttttcaacaaagggtaatatccggaaacctcctcggattccattgcccagctatctgtcactttattgtgaagatagtggaaaaggaaggtggctcctacaaatgccatcattgcgataaaggaaaggccatcgttgaagatgcctctgccgacagtggtcccaaagatggacccccacccacgaggagcatcgtggaaaaagaagacgttccaaccacgtcttcaaagcaagtggattgatgtgatggtccgatgtgagacttttcaacaaagggtaatatccggaaacctcctcggattccattgcccagctatctgtcactttattgtgaagatagtggaaaaggaaggtggctcctacaaatgccatcattgcgataaaggaaaggccatcgttgaagatgcctctgccgacagtggtcccaaagatggacccccacccacgaggagcatcgtggaaaaagaagacgttccaaccacgtcttcaaagcaagtggattgatgtgatatctccactgacgtaagggatgacgcacaatctagacgcaagacccttcctctatataaggaagttcatttcatttggagagga
